United States Patent Application Publication US 2014/0259212 A1 - sequence listing, part 43

SEQ ID NO: 155651 - protein, 237 aa, Artificial sequence
  consensus sequence
  Variant (17)..(17): Xaa in position 17 is any amino acid
  Variant (55)..(55): Xaa in position 55 is any amino acid
  Variant (66)..(66): Xaa in position 66 is any amino acid
  Variant (79)..(79): Xaa in position 79 is any amino acid
  Variant (90)..(90): Xaa in position 90 is any amino acid
  Variant (101)..(101): Xaa in position 101 is any amino acid
  Variant (104)..(104): Xaa in position 104 is any amino acid
  Variant (108)..(108): Xaa in position 108 is any amino acid
  Variant (115)..(115): Xaa in position 115 is any amino acid
  Variant (128)..(129): Xaa in position 128 to 129 is any amino acid
  Variant (137)..(137): Xaa in position 137 is any amino acid
  Variant (154)..(154): Xaa in position 154 is any amino acid
  Variant (173)..(173): Xaa in position 173 is any amino acid
  Variant (187)..(187): Xaa in position 187 is any amino acid
  Variant (190)..(190): Xaa in position 190 is any amino acid
  Variant (204)..(204): Xaa in position 204 is any amino acid
MESYSQNSNKLDFQHEXRILNGIWLITALGLVATAGLAWGAKYLEITATKYDSPXMYVAIGLLLLXMYGLSKDINKINXAIAGVIYLFLXSLVAIVVASLXPVXAIIXVFSTAGXMFLISMLAGLLFXXDPGSHRFXIMMTLTGLALVIIVNAXLMSERPIWVISCLMIVLWXGIISHGRNKLLELXGKXHSEELWSPVRCAFXGALTLYYYFIGFFGILAAIAITLVWQRHTRFFH

SEQ ID NO: 155652 - protein, 59 aa, Artificial sequence
  protein pattern
  Variant (10)..(10): Xaa in position 10 is Ala or Thr
  Variant (13)..(13): Xaa in position 13 is Cys or Ser
  Variant (27)..(27): Xaa in position 27 is any amino acid
  Variant (38)..(38): Xaa in position 38 is Cys or Gly
  Variant (45)..(45): Xaa in position 45 is Ala or Thr
  Variant (57)..(57): Xaa in position 57 is Arg or Ser
HGRNKLLELXGKXHSEELWSPVRCAFXGALTLYYYFIXFFGILAXIAITLVWQRHTXFF

SEQ ID NO: 155653 - protein, 59 aa, Artificial sequence
  protein pattern
  Variant (6)..(6): Xaa in position 6 is Leu or Val
  Variant (12)..(12): Xaa in position 12 is Ala or Thr
  Variant (17)..(17): Xaa in position 17 is Gly or Ser
  Variant (39)..(39): Xaa in position 39 is Ile or Leu
  Variant (50)..(50): Xaa in position 50 is Glu, Pro, Gln or Thr
  Variant (53)..(53): Xaa in position 53 is Ile or Val
QNSNKXDFQHEXRILNXIWLITALGLVATAGLAWGAKYXEITATKYDSPXMYXAIGLLL

SEQ ID NO: 155654 - protein, 60 aa, Artificial sequence
  protein pattern
  Variant (7)..(7): Xaa in position 7 is Ala or Ser
  Variant (20)..(20): Xaa in position 20 is any amino acid
  Variant (21)..(21): Xaa in position 21 is Phe, Ile or Val
  Variant (29)..(29): Xaa in position 29 is Ile or Met
  Variant (37)..(37): Xaa in position 37 is Leu or Val
  Variant (43)..(43): Xaa in position 43 is Met or Val
  Variant (46)..(46): Xaa in position 46 is Ala or Thr
  Variant (53)..(53): Xaa in position 53 is Ile or Val
  Variant (55)..(55): Xaa in position 55 is Ile or Val
  Variant (60)..(60): Xaa in position 60 is Met or Val
VFSTAGXMFLISMLAGLLFXXDPGSHRFXIMMTLTGXALVIIXNAXLMSERPXWXISCLX

SEQ ID NO: 155655 - protein, 41 aa, Artificial sequence
  protein pattern
  Variant (13)..(13): Xaa in position 13 is any or no amino acid
  Variant (15)..(16): Xaa in position 15 to 16 is any or no amino acid
  Variant (25)..(25): Xaa in position 25 is Ile or Leu
  Variant (36)..(36): Xaa in position 36 is Ala or Val
  Variant (39)..(39): Xaa in position 39 is any amino acid
MYGLSKDINKINXAXXAGVIYLFLXSLVAIVVASLXPVXAI

SEQ ID NO: 155656 - protein, 8 aa, Artificial sequence
  protein pattern
  Variant (5)..(5): Xaa in position 5 is Pro or Ser
IVLWXGII

SEQ ID NO: 155657 - DNA, 2349 bp, Escherichia coli
  CDS (1)..(2349): transl_table=11
atgctgagtttatacgaaaagataaagataaggctgataattttatttttattggcagcactgtcatttattggtctttttttcatcattaactatcaactggtatcggagcgcgcggtaaaacgtgccgatagccgctttgaacttattcagaaaaacgttggctatttctttaaagatattgaacgttcggccctgacattaaaggactcactgtatttattaaaaaatacagaggagattcaacgcgccgtgattcttaaaatggaaatgatgccatttttagactcggtgggactggtacttgatgataataaatattatcttttttcgcggagggcgaatgataaaatcgttgtttatcatcaggaacaagtaaatggaccgcttgtcgacgagtcagggcgggttatttttgccgattttaacccatcgaaacgaccgtggtcggtggcttcagatgactctaacaacagctggaatccggcatacaattgctttgatcgtccgggtaaaaaatgtatctcttttacgctacacatcaacggcaaagatcacgatttgttagcggtggataaaattcatgtcgatttaaactggcgatatctgaacgagtatcttgatcaaatcagcgctaatgatgaagttctatttttgaaacaaggccatgagatcattgccaagaatcaactcgctcgtgaaaaactgattatttataatagcgaaggtaattataatattattgattctgtcgatactgaatatatcgaaaaaacatcagcggtgccaaacaacgcattattcgaaatctatttttattatcctggcggtaatttattgaacgcatcagataaacttttttatctgccgtttgcgttcattattatcgtattgctggtggtttatttaatgaccactcgtgtgttccgtcggcaattttctgaaatgacagagctggttaatacgctggcgtttttgcctgactcaacggatcaaatcgaggctctgaaaattcgtgaaggcgatgcgaaagagattatcagcatcaaaaattcgatcgcggaaatgaaagatgccgaaattgaacggtcaaataaattgctctcactgatctcttacgatcaggaaagtggttttattaaaaatatggcgattattgagtctaacaataatcagtatctggctgtggggatcatcaaactgtgtggtctggaagccgtggaagcggtgtttggtgttgatgagcgcaataaaatcgtcaggaaattgtgtcagcgaattgccgagaaatatgcgcaatgctgcgatatcgtgacattcaatgccgatctctatttacttctgtgtcgggaaaatgtacagacatttacccgtaaaatagcgatggtaaacgattttgacagcagctttggctaccgcaatctgcgcatccataagtctgccatttgtgaacctttgcagggggaaaacgcctggagttacgcagaaaaactgaaactggcgatttccagtatccgtgaccatatgttctcagagtttattttctgtgatgacgcgaaactcaacgaaatagaagagaatatctggattgcgcgtaatattcgccatgcaatggaaattggcgaactattcctcgtctatcaaccgatcgttgatattaacacccgcgccattctgggcgcggaggcgttgtgccgttgggtgtctgcggagcgggggatcatttcaccgctgaagttcattaccattgctgaagatatcgggtttatcaatgagctgggttatcagattattaaaacggcaatgggtgaattcagacattttagtcagcgtgcgtcgctgaaggatgatttcttactgcatattaatgtttcgccctggcagttaaacgaaccacactttcatgagcgttttaccaccatcatgaaagaaaatggcctgaaggcgaacagcctctgtgttgagatcactgaaaccgtgatcgagcgaattaatgaacatttttatctcaatattgaacaactgcgtaaacaaggggtacggatatcgattgatgactttggcaccggtttgtcaaacctgaaacgtttttatgaaattaatccagacagcataaaggtggactcgcaattcaccggcgatattttcggtactgcgggaaaaattgtgcgcattattttcgacctggcacgctataaccggatcccggtgattgcggaaggcgtagagagcgaagacgttgcgcgcgaattaatcaaattaggatgtgttcaggctcaggggtatctgtaccagaaacccatgccattctccgcctgggataaaagtggaaaattagtaaaagagtaa

SEQ ID NO: 155658 - protein, 782 aa, Escherichia coli
MLSLYEKIKIRLIILFLLAALSFIGLFFIINYQLVSERAVKRADSRFELIQKNVGYFFKDIERSALTLKDSLYLLKNTEEIQRAVILKMEMMPFLDSVGLVLDDNKYYLFSRRANDKIVVYHQEQVNGPLVDESGRVIFADFNPSKRPWSVASDDSNNSWNPAYNCFDRPGKKCISFTLHINGKDHDLLAVDKIHVDLNWRYLNEYLDQISANDEVLFLKQGHEIIAKNQLAREKLIIYNSEGNYNIIDSVDTEYIEKTSAVPNNALFEIYFYYPGGNLLNASDKLFYLPFAFIIIVLLVVYLMTTRVFRRQFSEMTELVNTLAFLPDSTDQIEALKIREGDAKEIISIKNSIAEMKDAEIERSNKLLSLISYDQESGFIKNMAIIESNNNQYLAVGIIKLCGLEAVEAVFGVDERNKIVRKLCQRIAEKYAQCCDIVTFNADLYLLLCRENVQTFTRKIAMVNDFDSSFGYRNLRIHKSAICEPLQGENAWSYAEKLKLAISSIRDHMFSEFIFCDDAKLNEIEENIWIARNIRHAMEIGELFLVYQPIVDINTRAILGAEALCRWVSAERGIISPLKFITIAEDIGFINELGYQIIKTAMGEFRHFSQRASLKDDFLLHINVSPWQLNEPHFHERFTTIMKENGLKANSLCVEITETVIERINEHFYLNIEQLRKQGVRISIDDFGTGLSNLKRFYEINPDSIKVDSQFTGDIFGTAGKIVRIIFDLARYNRIPVIAEGVESEDVARELIKLGCVQAQGYLYQKPMPFSAWDKSGKLVKE

SEQ ID NO: 155659 - DNA, 2349 bp, Escherichia coli CFT073
  CDS (1)..(2349): transl_table=11
atgctgagtttatacgaaaagataaagataaggctgataattttatttttattggcagcactgtcatttattggtctttttttcatcattaactatcaactggtatcggaacgcgcggtaaaacgtgccgatagccgctttgaacttattcagaaaaacgttggctatttctttaaagatattgaacgttcggccctgacattaaaggactcactgtatttattaaaaaatacagaggagattcaacgcgccgtaattctgaaaatggaaatgatgccatttttagactcggtgggactggtacttgatgataataaatattatctcttttcgcggagggcgaataataaaatcgttgtttatcatcaggaacaagtaaatggaccgcttgtcgacgagtcagggcgggttatttttgccgattttaacccatcgaaacgaccgtggtcgatggcttcagatgactctaacaacagctggaaccccgcatacaattgctttgatcgtccgggtaaaaaatgtatctcttttacgctacacatcaacggcaaagatcatgatttgttagcggtagataaaattcatgtcgatttaaactggcgatatctgaacgagtatcttgatcacatcagcgctaatgatgaagttctatttttaaagcaaggtcatgagatcattgctaagaatcaactcgctcgtgaaaaattgattatttataatagcgaaggtaattataatattattgattctgtcgatacggaatatattgaaaaaacatcagcggtgccaaacaacgcattattcgaaatctatttttattatcctggtggtaatttattgaacgcatcagataaacttttttatctgccgtttgctttcattattatcgtattgctggtggtttatttaatgaccactcgagtgttccgtcggcaattttctgaaatgacagatttggtcaatacgctggcgtttttgcccgactctacggatcaaatcgaggctctgaagattcgtgaaggcgatgcgaaagagattatcagcatcaaaaattcgatcgcggaaatgaaagatgctgaaattgaacgggcaaataaattgctctcgctgatctcttacgatcaggaaagcggttttattaaaaatatggcgattattgagtccaacaataatcagtatctggctgtggggatcatcaaactgtgtggtctggaagctgtggaagcggtgtttggtgttgatgaacgcaataaaatcgtcaggaaattgtgtcagcgaattgccgagaaatatgcgcaatgctgcgatatcgtgacatttaatgccgatctctatttactcctgtgccgggaaaatgtacagacgtttacccgtaagatagcgacggtaaacgattttgacagcagttttggctaccgcaatctgcgcatccataagtctgctatttgtgaacctttgcagggggaaaacgccaggagttacgcagaaaagctgaaactggcgatttccagtatccgcaaccatatgttctcagagtttattttctgtgatgatgcgaaactcaacgaaatagaagagaatatctggattgcgcgtaatattcgccatgcaatggaaattggcgaactattcctggtctatcaaccgattgttgatattaacacccgcaccattttgggcgcggaggcgttgtgccgttgggtgtctgcggagcgggggattatttcaccgctgaagttcattaccattgctgaagatatcgggtttatcaatgagctgggctatcaaattattaaaaccgcgatgggtgaattcagacattttagtcagcgtgcgtcgctgaaggatgatttcttactgcatattaatgtttcgccctggcagttaaacgaaccacactttcatgagcgttttactaccatcatgaaagaaaatggcctgaaggcgaacagcctttgtgttgagatcaccgaaaccgtgatcgagcgaattaatgaacatttctatctcaatattgaacaactgcgtaaacaaggggtacgggtatcgattgatgactttggcaccggtttgtcaaacctgaaacgtttttatgaaattaatccagacagtataaaggtggattcgcaatttaccggcgatattttcggtactgcaggaaaaattgtgcgcattattttcgatctggcacgctataaccggatcccggtgattgcggaaggcgtagagagcgaagacgttgcgcgtgaattaatcaaattaggatgtgttcaggctcaggggtatctgtaccagaaacccatgccattctccgcctgggataaaagtggaaaattagtaaaagagtag

SEQ ID NO: 155660 - protein, 782 aa, Escherichia coli CFT073
MLSLYEKIKIRLIILFLLAALSFIGLFFIINYQLVSERAVKRADSRFELIQKNVGYFFKDIERSALTLKDSLYLLKNTEEIQRAVILKMEMMPFLDSVGLVLDDNKYYLFSRRANNKIVVYHQEQVNGPLVDESGRVIFADFNPSKRPWSMASDDSNNSWNPAYNCFDRPGKKCISFTLHINGKDHDLLAVDKIHVDLNWRYLNEYLDHISANDEVLFLKQGHEIIAKNQLAREKLIIYNSEGNYNIIDSVDTEYIEKTSAVPNNALFEIYFYYPGGNLLNASDKLFYLPFAFIIIVLLVVYLMTTRVFRRQFSEMTDLVNTLAFLPDSTDQIEALKIREGDAKEIISIKNSIAEMKDAEIERANKLLSLISYDQESGFIKNMAIIESNNNQYLAVGIIKLCGLEAVEAVFGVDERNKIVRKLCQRIAEKYAQCCDIVTFNADLYLLLCRENVQTFTRKIATVNDFDSSFGYRNLRIHKSAICEPLQGENARSYAEKLKLAISSIRNHMFSEFIFCDDAKLNEIEENIWIARNIRHAMEIGELFLVYQPIVDINTRTILGAEALCRWVSAERGIISPLKFITIAEDIGFINELGYQIIKTAMGEFRHFSQRASLKDDFLLHINVSPWQLNEPHFHERFTTIMKENGLKANSLCVEITETVIERINEHFYLNIEQLRKQGVRVSIDDFGTGLSNLKRFYEINPDSIKVDSQFTGDIFGTAGKIVRIIFDLARYNRIPVIAEGVESEDVARELIKLGCVQAQGYLYQKPMPFSAWDKSGKLVKE

SEQ ID NO: 155661 - DNA, 2349 bp, Escherichia coli B
  CDS (1)..(2349): transl_table=11
atgctgagtttatacgaaaagataaagataaggctgataattttatttttattggcagcactgtcatttattggtctttttttcatcattaactatcaactggtatcggaacgcgcggtaaaacgtgccgatagccgctttgaacttattcagaaaaacgttggctatttctttaaagatattgaacgttcggccctgacattaaaggactcactgtatttattaaaaaatacagaggagattcaacgcgccgtgattctgaaaatggaaatgatgccatttttagactcggtgggactggtacttgatgataataaatattatctcttttcacggagggcgaatgataaaatcgttgtttatcatcaggaacaagtaaatggaccgcttgtcgacgagtcagggcgggttatttttgccgattttaacccatcgaaacgaccgtggtcggtggcttcagatgactctaacaacagctggaatccggcatacaattgctttgatcgtccgggtaaaaaatgtatctcttttacgctacgtatcaacggcaaagatcacgatttgttagcggtagataaaattcatgtcgatttaaactggcggtatctgaacgagtatcttgatcaaatcagcgctaatgatgaagttctatttttgaaacaaggtcatgagatcattgccaagaatcaactcgctcgtgaaaaactgattatttataatagcgaaggtaattataatattattgattctgtcgatacggagtatattgcaaagacatcagcagtgccaaataatgcattgttcgaaatctatttttattatcctggcggtaatttattgaacgcctcagataaacttttttatctgccgtttgcgttcattattatcgtattgctggtggtttatttaatgaccactcgtgtgttccgtcggcaattttctgaaatgacagagctggttaatacgctggcatttttgcccgactcaacggatcaaatcgaggctctgaaaattcgcgaaggcgatgcgaaagagattatcagcattaaaaattcgatcgcggaaatgaaagatgccgaaattgaacggtcaaataaattgctctcactgatctcttacgatcaggaaagcggttttattaaaaatatggcgattattgagtccaacaataatcagtatctggctgtggggatcatcaaactgtgtggtctggaagccgtggaagcggtgtttggtgttgatgaacgcaataaaatcgtcaggaaattgtgtcagcgaattgccgaaaaatatgcgcaatgctgcgatatcgtgacattcaatgccgatctctatttacttctgtgccgggaaaatgtacagacatttacccgtaaaatagcgatggtaaacgattttgacagcagctttggctaccgtaatctgcacatccataagtctgccatttgtgaacctttgcagggggaaaacgcctggagttacgcagaaaaactgaaactggcgatttccagtatccgtgaccatatgttctcagagtttattttctgtgatgacgcgaaactcaacgaaatagaagagaatatctggattgcgcgtaatattcgccatgcaatggaaattggcgaactattcctggtctatcaaccgatcgttgatattaacacccgcgccattctgggcgcggaggcgttgtgccgttgggtgtctgcggagcgggggatcatttcaccgctgaagttcattaccattgctgaagatatcgggtttatcaatgagctgggttatcagattattaaaacggcaatgggtgaattcagacattttagtcagcgtgcgtcgctgaagaatgatttcttactgcatattaatatttcgccatggcagttaaacgaaccgcactttcatgagcgttttaccaccatcatgaaagaaaatggcctgaaggcgaacagcctctgtgttgagatcactgaaaccgtgatcgagcgaattaatgaacatttttatctcaatattgaacaactgcgtaaacaaggggtacggatatcgattgatgactttggcaccggtttgtcaaacctgaaacgtttttatgaaattaatccagatagcataaaggtggactcgcaatttaccggcgatattttcggtactgcgggaaaaattgtgcgcattattttcgacctggcacgctataaccggatcccggtgattgcggaaggcgtagagagcgaagacgttgcgcgcgaattaatcaaattaggatgtgttcaggctcaggggtatctgtaccagaaacccatgccattctccgcctgggataaaagtggaaaattagtaaaagagtag

SEQ ID NO: 155662 - protein, 782 aa, Escherichia coli B
MLSLYEKIKIRLIILFLLAALSFIGLFFIINYQLVSERAVKRADSRFELIQKNVGYFFKDIERSALTLKDSLYLLKNTEEIQRAVILKMEMMPFLDSVGLVLDDNKYYLFSRRANDKIVVYHQEQVNGPLVDESGRVIFADFNPSKRPWSVASDDSNNSWNPAYNCFDRPGKKCISFTLRINGKDHDLLAVDKIHVDLNWRYLNEYLDQISANDEVLFLKQGHEIIAKNQLAREKLIIYNSEGNYNIIDSVDTEYIAKTSAVPNNALFEIYFYYPGGNLLNASDKLFYLPFAFIIIVLLVVYLMTTRVFRRQFSEMTELVNTLAFLPDSTDQIEALKIREGDAKEIISIKNSIAEMKDAEIERSNKLLSLISYDQESGFIKNMAIIESNNNQYLAVGIIKLCGLEAVEAVFGVDERNKIVRKLCQRIAEKYAQCCDIVTFNADLYLLLCRENVQTFTRKIAMVNDFDSSFGYRNLHIHKSAICEPLQGENAWSYAEKLKLAISSIRDHMFSEFIFCDDAKLNEIEENIWIARNIRHAMEIGELFLVYQPIVDINTRAILGAEALCRWVSAERGIISPLKFITIAEDIGFINELGYQIIKTAMGEFRHFSQRASLKNDFLLHINISPWQLNEPHFHERFTTIMKENGLKANSLCVEITETVIERINEHFYLNIEQLRKQGVRISIDDFGTGLSNLKRFYEINPDSIKVDSQFTGDIFGTAGKIVRIIFDLARYNRIPVIAEGVESEDVARELIKLGCVQAQGYLYQKPMPFSAWDKSGKLVKE

SEQ ID NO: 155663 - DNA, 25 bp, Artificial sequence
  primer
atgctgagtttatacgaaaagataa

SEQ ID NO: 155664 - DNA, 28 bp, Artificial sequence
  primer
ttactcttttactaattttccactttta

SEQ ID NO: 155665 - DNA, 786 bp, ESCHERICHIA COLI
  CDS (1)..(786): transl_table=11
atgcaggatcgcaattttgatgatattgcggaaaagttttcccgtaacatttacggcaccaccaaagggcagcttcgacaggctattctgtggcaggatctcgatcgcgtgctggcggaaatgggcccgcaaaaactgcgtgtgctggatgctggcggtggagaagggcagaccgcaatcaaaatggccgagcgtgggcatcaggtcattttatgcgatctttctgcgcagatgatcgaccgcgcaaaacaggcggcagaagcaaaaggtgtgagcgacaacatgcaatttatacattgcgccgctcaggatgttgcttcgcatttggaaacgcccgttgatctgatattgttccatgcggtgctcgagtgggtggctgatccccgcagcgtattgcagaccctctggtcagtgttgcgtccaggcggcgtgttgtcgttaatgttctacaatgcgcatggtttgttgatgcataacatggtcgccgggaattttgattacgtgcaggcgggaatgccgaaaaagaaaaaacggacgctttcgccagattatccacgcgacccggcgcaggtttatctgtggctggaagaagctggttggcaaattatgggtaagacaggcgttcgcgtgtttcatgattatctgcgcgagaaacaccagcagcgcgactgctatgaagcattacttgaattagaaacgcgttattgccgtcaggaaccgtatattaccctggggcgttatattcatgtcaccgcgcgcaaaccgcagagcaaggataaagtataa

SEQ ID NO: 155666 - protein, 261 aa, ESCHERICHIA COLI
MQDRNFDDIAEKFSRNIYGTTKGQLRQAILWQDLDRVLAEMGPQKLRVLDAGGGEGQTAIKMAERGHQVILCDLSAQMIDRAKQAAEAKGVSDNMQFIHCAAQDVASHLETPVDLILFHAVLEWVADPRSVLQTLWSVLRPGGVLSLMFYNAHGLLMHNMVAGNFDYVQAGMPKKKKRTLSPDYPRDPAQVYLWLEEAGWQIMGKTGVRVFHDYLREKHQQRDCYEALLELETRYCRQEPYITLGRYIHVTARKPQSKDKV

SEQ ID NO: 155667 - DNA, 783 bp, Vibrio cholerae O1 biovar El Tor str. N16961
  CDS (1)..(783): transl_table=11
atgacagaagatcgcaatttcgacgatattgcccacaaatttgcaaaaaatatatacggttctgacaaaggtgagatccgccaagtcattgtttgggaagatttggagcagcttctcagtcaactggacacgcaaaaagttcccttgcacgtgctcgatgcgggtggcggcttggcgcaagtatcgcaaaaaatcgctcgccttgggcatcgagtgacactctgtgatctttcttcggaaatgttgcaattggccgaacaggatattgcaaacaatggcctgcttgagcagtatcgcttcgtccattcaccagtgcagacgattcaagcacaccttgatgcgcccgtggatttggtgctgtttcatgcggtgatggaatggttagcggagcccaaaccggcgttgcaaaatttgttggcgcaagttagaccgggcggcatggtgtcggtgatgttttacaactatcacggtttggtttacaaaaacgccgtgtgtggcaacattccgcacgtgctagaggatatgccgcaccgcaaacggtttaaattacaaccgcagaaaggcttgctccccgaagaggtctaccaatggatcgaagaatcgagttttgagatctgcgggaaatccggtattcgttgtttcagtgattacatcggaaacatgaaaaacatgggcgaataccagtatgaggatttggtggcactggagcgcaaattctgccgtcaggagccttacctctcattaggccgatacatccacgtatgggctaagaaaaaacaataa

SEQ ID NO: 155668 - protein, 260 aa, Vibrio cholerae O1 biovar El Tor str. N16961
MTEDRNFDDIAHKFAKNIYGSDKGEIRQVIVWEDLEQLLSQLDTQKVPLHVLDAGGGLAQVSQKIARLGHRVTLCDLSSEMLQLAEQDIANNGLLEQYRFVHSPVQTIQAHLDAPVDLVLFHAVMEWLAEPKPALQNLLAQVRPGGMVSVMFYNYHGLVYKNAVCGNIPHVLEDMPHRKRFKLQPQKGLLPEEVYQWIEESSFEICGKSGIRCFSDYIGNMKNMGEYQYEDLVALERKFCRQEPYLSLGRYIHVWAKKKQ

SEQ ID NO: 155669 - DNA, 750 bp, Pseudomonas aeruginosa PAO1
  CDS (1)..(750): transl_table=11
atgagcgaccgccacttcgacgaactggcgacgcgcttcgccgaaaagatctacggcggcgccaagggtgcgatccgcctcgcggtactccaggccgacctcgccgaggccctcccggagcgacctctgcgggtcctcgacatcggcgccgggctcggccacatgtcgctctggctggccgctcgcggccaccgcgtaaccctcgccgagccagcgcaacccatgctcgacggcgcccgccagcgcttcgccgaagccgggcaggccgccgaattcatccaggcgccctggcaggaactgctcggccagctcaccgagccctacgacctggtgctctgccacgccgtgctcgagtggctggccgaaccccatgcgatcctgccggtgctgcaccaactctgcgcacccggcggctggctgtcgctggccttctacaaccgcgacgcgctgatctaccgcaacctgctcaagggccacttccgcaagctgcgcaaggagcgcttcgccggcgaggggcagagcctgaccccgcagcgcccgctcgacccgcgcgagctggaacaggcgctggcagcgcgttggcgcatcgaggcgcgcagcggcgtgcgcgtgttccacgactacatgccgagcgagttccaggccaaggccgaacggctcgacctggtggaaatggaactggcctaccgccgccacccggcctttgccgggcttggccgctacctgcactggctgtgccgcccgcaatga

SEQ ID NO: 155670 - protein, 249 aa, Pseudomonas aeruginosa PAO1
MSDRHFDELATRFAEKIYGGAKGAIRLAVLQADLAEALPERPLRVLDIGAGLGHMSLWLAARGHRVTLAEPAQPMLDGARQRFAEAGQAAEFIQAPWQELLGQLTEPYDLVLCHAVLEWLAEPHAILPVLHQLCAPGGWLSLAFYNRDALIYRNLLKGHFRKLRKERFAGEGQSLTPQRPLDPRELEQALAARWRIEARSGVRVFHDYMPSEFQAKAERLDLVEMELAYRRHPAFAGLGRYLHWLCRPQ

SEQ ID NO: 155671 - DNA, 786 bp, Escherichia coli O157:H7 EDL933
  CDS (1)..(786): transl_table=11
atgcaggatcgcaattttgatgatattgcggaaaagttttcccgtaacatttacggcaccaccaaagggcagcttcgacaggctattctgtggcaggatctcgatcgcgtgctggcggaaatgggtccgcaaaaactgcgtgtgctggatgcgggcggtggagaagggcagaccgcaatcaaaatggccgagcgcgggcatcaggtcattttatgcgatctttctgcgcagatgatcgaccgcgcaaaacaggcggcagaagcaaaaggtgtgagcgacaacatgcaatttatacattgcgccgctcaggatgttgcttcgcatttggaaacgcccgttgatctgatattgttccatgcggtgctcgagtgggtggctgatccccgcagcgtattgcagaccctgtggtcagtgttgcgtccaggcggcgtgttgtcgttaatgttctacaatgcgcatggtttgttgatgcataacatggtcgccgggaattttgattacgtgcaggcgggaatgccgaaaaagaaaaaacggacgctttcgccagattatccacgcgacccgacgcaggtttatctgtggctggaagaagctggttggcaaattatgggtaagacaggcgttcgcgtgtttcatgattatctgcgcgagaagcaccagcagcgcgactgctatgaagcattacttgaattagaaacgcgttattgccgtcaggaaccgtatattaccctggggcgttatattcatgtcaccgcgcgcaaaccgcagagcaaggataaagtatga

SEQ ID NO: 155672 - protein, 261 aa, Escherichia coli O157:H7 EDL933
MQDRNFDDIAEKFSRNIYGTTKGQLRQAILWQDLDRVLAEMGPQKLRVLDAGGGEGQTAIKMAERGHQVILCDLSAQMIDRAKQAAEAKGVSDNMQFIHCAAQDVASHLETPVDLILFHAVLEWVADPRSVLQTLWSVLRPGGVLSLMFYNAHGLLMHNMVAGNFDYVQAGMPKKKKRTLSPDYPRDPTQVYLWLEEAGWQIMGKTGVRVFHDYLREKHQQRDCYEALLELETRYCRQEPYITLGRYIHVTARKPQSKDKV

SEQ ID NO: 155673 - DNA, 786 bp, Yersinia pestis CO92
  CDS (1)..(786): transl_table=11
atgcaggatcgcaatttcgatgatattgctgaaaaattttcccgcaatatctacggtacgacgaagggaatgattcgtcaggcggtggtgtggcaagatatcactgagttgttgacgcagttaccaccgcgtccgctacggattctagatgcgggcggcggtgagggtcatatggcatgccaactggcggccttaggccatcaggtgctgttgtgcgacttatctgctgaaatggtccagcgcgcaaaagcggcagctcacgaaaaaggtgtgagccacaacatgcaatttatacaaagtgcagcgcaggacattcgtcaacatttagaacaacccgttgatctgatattgttccatgcggtattagaatggattgctgaacctcagcaggttctgcaaatactttttgatacgctaaaaccgggaggcgcactgtcgttgatgtttttcaatgccaacggattggtgatgcgtaatgcggtattgggcaactttcagttagccattcccggcgttaaacggcgtcggcaacgttcgttgtcaccgcaataccctttagacccaccaacggtatacggttggcttgagcaaatggggttatccattaggggtaaaacaggagtacgggtatttcacgattacatgaaaaataaacagcaacaaattgatgagtttgctgaattattagcgttggaacagcgctattgccggcaagagccctttattagtttggggcgctacgtgcatgttatggcgtttaagccgaatctgaaggacccattatga

SEQ ID NO: 155674 - protein, 261 aa, Yersinia pestis CO92
MQDRNFDDIAEKFSRNIYGTTKGMIRQAVVWQDITELLTQLPPRPLRILDAGGGEGHMACQLAALGHQVLLCDLSAEMVQRAKAAAHEKGVSHNMQFIQSAAQDIRQHLEQPVDLILFHAVLEWIAEPQQVLQILFDTLKPGGALSLMFFNANGLVMRNAVLGNFQLAIPGVKRRRQRSLSPQYPLDPPTVYGWLEQMGLSIRGKTGVRVFHDYMKNKQQQIDEFAELLALEQRYCRQEPFISLGRYVHVMAFKPNLKDPL

SEQ ID NO: 155675 - DNA, 804 bp, Salmonella enterica subsp. enterica serovar Typhi str. CT18
  CDS (1)..(804): transl_table=11
atgcaggatcgcaattttgatgacattgctgaaaagttttcccgtaacatttacggcacgaccaaagggcaactgcggcaagccattctgtggcaagacctggatcgcgtgctggaggagattggcgggcggaaactgcgggtgctggatgccggcggcggcgaagggcaaacggcgattaagatggcggaacgcggccatcaggtgacgttatgcgatctgtctggcgaaatgatcgcccgcgcgcggcaggcggccgaggcaaaaggtgtgagcaaagacatgcattttatacaatgcccggctcaggacgtcgcttcgcatttggaaagcccggttgatctgatattgtttcatgctgtgctggagtgggtagccgatcctgtcggcgtattagaaacgctctggtcagtattgcgccctggcggcgcgctgtcgttgatgttctataacgctaacggtttgctgatgcacaatatggtggcgggtaattttgactacgtgcaggcggggatgcctaaacgcaagaagcgcacgctgtcgcctgactacccgcgcgaccccgcgcaggtgtaccagtggctggaggcgattggctggcagattaccggtaaaaccggcgtgcgtgtgtttcatgattatctgcgtgaaaaacaccagcagcgtgactgttatgagaccctggtcgaactggaaacgcgttattgccgccaggagccgtatattagccttgggcgctacattcatgtcaccgcgattaaaagcccggcgctagccgcagatgcaaggataacctatgagtga

SEQ ID NO: 155676 - protein, 267 aa, Salmonella enterica subsp. enterica serovar Typhi str. CT18
MQDRNFDDIAEKFSRNIYGTTKGQLRQAILWQDLDRVLEEIGGRKLRVLDAGGGEGQTAIKMAERGHQVTLCDLSGEMIARARQAAEAKGVSKDMHFIQCPAQDVASHLESPVDLILFHAVLEWVADPVGVLETLWSVLRPGGALSLMFYNANGLLMHNMVAGNFDYVQAGMPKRKKRTLSPDYPRDPAQVYQWLEAIGWQITGKTGVRVFHDYLREKHQQRDCYETLVELETRYCRQEPYISLGRYIHVTAIKSPALAADARITYE

SEQ ID NO: 155677 - DNA, 792 bp, Yersinia pestis KIM
  CDS (1)..(792): transl_table=11
ttgcccatgcaggatcgcaatttcgatgatattgctgaaaaattttcccgcaatatctacggtacgacgaagggaatgattcgtcaggcggtggtgtggcaagatatcactgagttgttgacgcagttaccaccgcgtccgctacggattctagatgcgggcggcggtgagggtcatatggcatgccaactggcggccttaggccatcaggtgctgttgtgcgacttatctgctgaaatggtccagcgcgcaaaagcggcagctcacgaaaaaggtgtgagccacaacatgcaatttatacaaagtgcagcgcaggacattcgtcaacatttagaacaacccgttgatctgatattgttccatgcggtattagaatggattgctgaacctcagcaggttctgcaaatactttttgatacgctaaaaccgggaggcgcactgtcgttgatgtttttcaatgccaacggattggtgatgcgtaatgcggtattgggcaactttcagttagccattcccggcgttaaacggcgtcggcaacgttcgttgtcaccgcaataccctttagacccaccaacggtatacggttggcttgagcaaatggggttatccattaggggtaaaacaggagtacgggtatttcacgattacatgaaaaataaacagcaacaaattgatgagtttgctgaattattagcgttggaacagcgctattgccggcaagagccctttattagtttggggcgctacgtgcatgttatggcgtttaagccgaatctgaaggacccattatga

SEQ ID NO: 155678 - protein, 263 aa, Yersinia pestis KIM
MPMQDRNFDDIAEKFSRNIYGTTKGMIRQAVVWQDITELLTQLPPRPLRILDAGGGEGHMACQLAALGHQVLLCDLSAEMVQRAKAAAHEKGVSHNMQFIQSAAQDIRQHLEQPVDLILFHAVLEWIAEPQQVLQILFDTLKPGGALSLMFFNANGLVMRNAVLGNFQLAIPGVKRRRQRSLSPQYPLDPPTVYGWLEQMGLSIRGKTGVRVFHDYMKNKQQQIDEFAELLALEQRYCRQEPFISLGRYVHVMAFKPNLKDPL

SEQ ID NO: 155679 - DNA, 783 bp, Shewanella oneidensis MR-1
  CDS (1)..(783): transl_table=11
atgcaagataaaaatttcgataaactcgcgcaaaaatttgcgaagaacatttatggcacccctaaaggtgaaatccgtgccgccgtgctctggcgcgatctcgctcccgcattggcacagtttggcgataaaaagctacggattttagatgctggcggcggttttggttacttcagccaaaagctagcacgtcttggtcatgaggtcgtactctgcgatatttctgccgagatgctcgcccaagcaaaagagcaaatcgatgccagcgatacgccattggcaattcgcttagtccatgcgccgatccaagccctatcgattactgagcacggcatgttcgatctcatcctctgccatgccgtggttgaatggctagccgatgccaaaaccacgatggaaggcttactgacaatgctaaaacccaatgggctgttttcgctgatgttttacaataaagaagcgatgcggttccatgccttagtgtcaggcaatttcgactatgttgccgccgatctcaaagtgaagaagaaagtgcgactgacacctacacatcctctgtatattcatgaggttaagctatggtttgcccagtggcaaatggctttgctgaaagaatcaggtgtacgggtgatccacgattacttgaagaaacagcaagcggcggattttgactatcaaaaactgctcagtatggaactcgaatattcccaacgcgaaccctatatttcactcggccgttatgtgcattttctggggcaaagtacagcaacacactctgaataa

SEQ ID NO: 155680 - protein, 260 aa, Shewanella oneidensis MR-1
MQDKNFDKLAQKFAKNIYGTPKGEIRAAVLWRDLAPALAQFGDKKLRILDAGGGFGYFSQKLARLGHEVVLCDISAEMLAQAKEQIDASDTPLAIRLVHAPIQALSITEHGMFDLILCHAVVEWLADAKTTMEGLLTMLKPNGLFSLMFYNKEAMRFHALVSGNFDYVAADLKVKKKVRLTPTHPLYIHEVKLWFAQWQMALLKESGVRVIHDYLKKQQAADFDYQKLLSMELEYSQREPYISLGRYVHFLGQSTATHSE

SEQ ID NO: 155681 - DNA, 750 bp, Pseudomonas putida KT2440
  CDS (1)..(750): transl_table=11
atgaacgaccgtcatttcgatgagctggccacccgctttgccgaaaagatctatggcggcgccaagggtgcgatccgcctggccgtgctgcaggccgacctggccgaagcgctacccgaccgcccgctacgcatcctcgacatcggcgccgggttgggccacatggccttgtggctggccgagcgcggccaccagctgaccctggccgaacctgcggcgcccatgctcgacggcgccagggcacgctttgccgaagccggccagaccgcgactttcatccaggcgccctggcaagacctcctcggccaactgaccgagcgctacgacctggtgctctgccacgccgtgctcgaatggctggccgaacccgagagcatcctgccggtgctgcaccagctcacggcccccggcggttggttatcgctggccttctacaaccgcgacgccctggtctatcgcaacctgctcaagggccatttccgcaagttgcgcagcaaccggctggaaggtgaaaagcagagcctgacccctcagaaaccgcttgatccacgcgaactcaaggcgcaacttgagcctatgtggctggttgaaagcgaaagcggcgtgcgggtgtttcacgactatatgcccaaggaattccagggcaaggccgagctgctcgacctgctggaaatggaactggcccaccgtcgccaccccaccttcgccgggcttggccgctacctgcactgggtttgccgcccccgctaa

SEQ ID NO: 155682 - protein, 249 aa, Pseudomonas putida KT2440
MNDRHFDELATRFAEKIYGGAKGAIRLAVLQADLAEALPDRPLRILDIGAGLGHMALWLAERGHQLTLAEPAAPMLDGARARFAEAGQTATFIQAPWQDLLGQLTERYDLVLCHAVLEWLAEPESILPVLHQLTAPGGWLSLAFYNRDALVYRNLLKGHFRKLRSNRLEGEKQSLTPQKPLDPRELKAQLEPMWLVESESGVRVFHDYMPKEFQGKAELLDLLEMELAHRRHPTFAGLGRYLHWVCRPR

SEQ ID NO: 155683 - DNA, 798 bp, Escherichia coli CFT073
  CDS (1)..(798): transl_table=11
atggagaaagcaatgcaggatcgcaattttgatgatattgcggaaaagttttcccgtaacatttacggcaccaccaaagggcagcttcgacaggctattctgtggcaggatctcgatcgcgtgctggcggaaatgggcccgcaaaaactgcgtgtgctggatgctggcggcggagaagggcagaccgcaatcaaaatggccgagcgcgggcatcaggtcattttatgcgatctttctgcgcagatgatcgaccgcgcaaaacaggcggcagaagcaaaaggtgtgagcgacaacatgcaatttatacattgcgccgctcaggatgttgcttcgcatttggaaacgcccgttgatctgatattgttccatgcggtgctcgagtgggtggccgatccccgcagcgtattacagaccctgtggtcagtgttgcgtccaggcggcgtattgtcgttaatgttctacaatgcgcatggtttgttgatgcataacatggtcgccgggaattttgattacgtgcaggcgggaatgccgaaaaagaaaaaacggacgctttcgccagattatccacgcgacccggcgcaggtttatctgtggctggaagaagctggttggcaaattctgggtaagacaggcgttcgcgtgtttcatgattatctgcgcgagaagcaccagcagcgcgactgctatgaagcattacttgaattagaaacgcgttattgccgtcaggaaccgtatattaccttggggcgttatattcatgtcaccgcgcgcaaaccgcagagcaaggataaagtatga

SEQ ID NO: 155684 - protein, 265 aa, Escherichia coli CFT073
MEKAMQDRNFDDIAEKFSRNIYGTTKGQLRQAILWQDLDRVLAEMGPQKLRVLDAGGGEGQTAIKMAERGHQVILCDLSAQMIDRAKQAAEAKGVSDNMQFIHCAAQDVASHLETPVDLILFHAVLEWVADPRSVLQTLWSVLRPGGVLSLMFYNAHGLLMHNMVAGNFDYVQAGMPKKKKRTLSPDYPRDPAQVYLWLEEAGWQILGKTGVRVFHDYLREKHQQRDCYEALLELETRYCRQEPYITLGRYIHVTARKPQSKDKV

SEQ ID NO: 155685 - DNA, 810 bp, Vibrio vulnificus CMCP6
  CDS (1)..(810): transl_table=11
atgataactcaagctgctgtgaaccaagaccgtaatttcgacgatattgcccacaaatttgcaaaaaatatttacgggtcagacaaaggcgagattcgccaagtgattgtttgggaagatcttcaacaattgttagccacctttgacgaggccaaacagcctctaaccgtattggatgcggggggcgggttggcacaaatgtcacaaaagcttgccaaactcggacatcacattgccttatgtgatctatcttctgaaatgctgcaattagcagagcaggatattgcaaaaaatggcttgcttgagcagtatcggctgatccattctccggtgcagaagattggtgagcacctagcagagcccgtcgatgtggtgatgtttcatgccgtgatggaatggttggcggatccaaaatccgcgttggaaacggtattagaacaagtcgcaccgggtggcgccgcgtctattatgttctacaaccaccatggcttggtttataagaatgtggtctgtggcaatatcccacatattcttgagggtatgcctcatcgcaaacgctttaagctgcaaccgcaaaaaggcctagaacctcaatctgtttatcagtggattgaagacgcaggttttgaaatttatggaaaatccggtattcgctgtttcagtgattatatagggaacagacagaatatgggtgattaccagtacgaggatgtgctcgagttggaacgacgtctgtgtcgccaagagccttacctctcgctgggccgatacattcatgtgtgggctaagaagaaagataaacaggaataa

SEQ ID NO: 155686 - protein, 269 aa, Vibrio vulnificus CMCP6
MITQAAVNQDRNFDDIAHKFAKNIYGSDKGEIRQVIVWEDLQQLLATFDEAKQPLTVLDAGGGLAQMSQKLAKLGHHIALCDLSSEMLQLAEQDIAKNGLLEQYRLIHSPVQKIGEHLAEPVDVVMFHAVMEWLADPKSALETVLEQVAPGGAASIMFYNHHGLVYKNVVCGNIPHILEGMPHRKRFKLQPQKGLEPQSVYQWIEDAGFEIYGKSGIRCFSDYIGNRQNMGDYQYEDVLELERRLCRQEPYLSLGRYIHVWAKKKDKQE

SEQ ID NO: 155687 - DNA, 786 bp, Shigella flexneri 2a str. 2457T
  CDS (1)..(786): transl_table=11
atgcaggatcgcaattttgatgatattgcggaaaagttttcccgtaacatttacggcaccaccaaagggcagcttcgacaggctattctgtggcaggatctcgatcgcgtgctggcggaaatgggcccgcaaaaactgcgtgtgctggatgctggcggcggagaagggcagaccgcaatcaaaatggccgagcgcgggcatcaggttattttatgcgatctttctgcgcagatgatcgaccgcgcaaaacaggcggcagaagcaaaaggtgtgagcgacaacatgcaatttatacattgcgccgctcaggatgttgcttcgcatttggaaacgcccgttgatctgatattgttccatgcggtgctcgagtgggtggccgatccccgcagtgtattgcagaccctgtggtcagtgttgcgtccaggcggagtgttgtcgttaatgttctacaatgcgcatggtttgttgatgcataacatggtcgccgggaattttgattacgtgcaggcgggaatgccgaaaaagaaaaaacggacgctttcgccagattatccacgcgacccggcgcaggtttatctgtggctggaagaagctggttggcaaattatgggtaagacaggcgttcgcgtgtttcatgattatctgcgcgagaagtaccagcagcgcgactgctatgaagcattacttgaattagaaacgcgttattgccgtcaggaaccgtatattaccctagggcgttatattcatgtcaccgcgcgcaaaccgcagagcaaggataaagtatga

SEQ ID NO: 155688 - protein, 261 aa, Shigella flexneri 2a str. 2457T
MQDRNFDDIAEKFSRNIYGTTKGQLRQAILWQDLDRVLAEMGPQKLRVLDAGGGEGQTAIKMAERGHQVILCDLSAQMIDRAKQAAEAKGVSDNMQFIHCAAQDVASHLETPVDLILFHAVLEWVADPRSVLQTLWSVLRPGGVLSLMFYNAHGLLMHNMVAGNFDYVQAGMPKKKKRTLSPDYPRDPAQVYLWLEEAGWQIMGKTGVRVFHDYLREKYQQRDCYEALLELETRYCRQEPYITLGRYIHVTARKPQSKDKV

SEQ ID NO: 155689 - DNA, 780 bp, Photorhabdus luminescens subsp. laumondii TTO1
  CDS (1)..(780): transl_table=11
atgcgggatcgcaatttcgatgatattgcagacaaattctctcgtaatatttacggcacaaccaaaggtaaaatcaggcaagccgttgtctggcaggatattagcgaattactggctcaattacctcaacgtccactgcgtattttagatgcgggtggtggagagggaaatatggcatgccaattagctgaattgggtcatcaagtgatattgtgtgatttatcagaagagatgatccagcgagcaaggctggccgcagaagagaaaggggtcagccaaaatatgcaatttatacaaagtccggtacaagaaattagccaatatatagagcagccggtagatttggtattatttcatgcagtactggaatggattaccgatcagaaatatgcaatagaagtgctaatgaatatcattaatccgggtggcgctctatctttaatgttttacaatgccaatggcttagtaatgcgcaatgctattttaggtaattttcatttggcgacgcccaatatacaacgccgcagaaaacgttcattatcgcctcagaatccgttggcacctgaacaggtatatcaatggcttgatgaattaaatatgacgattaccggcaaaactggcgtgcgtgtttttcacgattatttgcaaaatcgccaattacagaacgaaaactttccggcgttgctggaattggaacagcgttattgccgacaggagccttatatcagcttggggcgctacattcatgtcatggcacgcaagcccgctttaacagtttaa

SEQ ID NO: 155690 - protein, 259 aa, Photorhabdus luminescens subsp. laumondii TTO1
MRDRNFDDIADKFSRNIYGTTKGKIRQAVVWQDISELLAQLPQRPLRILDAGGGEGNMACQLAELGHQVILCDLSEEMIQRARLAAEEKGVSQNMQFIQSPVQEISQYIEQPVDLVLFHAVLEWITDQKYAIEVLMNIINPGGALSLMFYNANGLVMRNAILGNFHLATPNIQRRRKRSLSPQNPLAPEQVYQWLDELNMTITGKTGVRVFHDYLQNRQLQNENFPALLELEQRYCRQEPYISLGRYIHVMARKPALTV

SEQ ID NO: 155691 - DNA, 861 bp, Vibrio vulnificus YJ016
  CDS (1)..(861): transl_table=11
atgcctctttatatctgctttccttatgacagaatagcagcacgattagatatgataactcaagctgctgtgaaccaagaccgtaatttcgacgatattgcccacaaatttgcaaaaaatatttacgggtcagacaaaggcgagattcgccaagtgattgtttgggaagatcttcaacaattgttagccacctttgacgaggccaaacagcctctaaccgtattggatgcggggggcgggttggcacaaatgtcacaaaagcttgccaaactcggacatcacattgccttatgtgatctatcttctgaaatgctgcaattagcagagcaggatattgcaaaaaatggcttgcttgagcagtatcggctgatccattctccggtgcagaagattggtgagcacctagcagagcccgtcgatgtggtgatgtttcatgccgtgatggagtggttggcggatccaaaatccgcgttggaaacggtattagaacaagtcgcaccgggtggcgccgcgtctattatgttctacaaccaccatggcttggtttataagaatgtggtctgtggcaatatcccacatattcttgagggtatgcctcatcgcaaacgctttaagctgcaaccgcaaaaaggcctagaacctcaatctgtttatcagtggattgaagacgcaggttttgaaatttatggaaaatccggtattcgctgtttcagtgattatatagggaacagacagaatatgggtgattaccagtacgaggatgtgctcgagttggaacgacgtctgtgtcgccaagagccttacctctcgctgggccgatacattcatgtgtgggctaagaagaaagataaacaggaataa

SEQ ID NO: 155692 - protein, 286 aa, Vibrio vulnificus YJ016
MPLYICFPYDRIAARLDMITQAAVNQDRNFDDIAHKFAKNIYGSDKGEIRQVIVWEDLQQLLATFDEAKQPLTVLDAGGGLAQMSQKLAKLGHHIALCDLSSEMLQLAEQDIAKNGLLEQYRLIHSPVQKIGEHLAEPVDVVMFHAVMEWLADPKSALETVLEQVAPGGAASIMFYNHHGLVYKNVVCGNIPHILEGMPHRKRFKLQPQKGLEPQSVYQWIEDAGFEIYGKSGIRCFSDYIGNRQNMGDYQYEDVLELERRLCRQEPYLSLGRYIHVWAKKKDKQE

SEQ ID NO: 155693 - DNA, 786 bp, Yersinia enterocolitica subsp. enterocolitica 8081
  CDS (1)..(786): transl_table=11
atgcaggatcgcaatttcgatgatattgccgagaaattctcgcgcaatatctacggcacgacgaagggaatgatccgtcaggcggtggtgtggcaagatatcaccgggctgttagcgcagttaccgcaacgcccgttacggattttagatgcaggtggtggtgaagggcatatggcttgccaattggcggcattgggccatcaggttctattatgtgacctgtctgccgagatgatccagcgtgcaaaaattgcggctgaagaaaaaggtgtgagccacaacatgcaatttgtacaaagtgcggctcaggacatcacccaacatttagcacagcccgttgatctgatattgttccatgcggttttagaatggattgcagagccacaacaagttctgcaaatactttttaatgcgctaaacccaggtggcgcgctatcgttgatgtttttcaatgccaatgggctggtgatgcgtaatgcggtattaggtaactttcaattggcgataccgggcgttaaaagacgtcggcagcgctcgttgtcgccgcaataccctttagatcccccgacggtatatggttggcttgagcaaatgggtttatccattagcggtaagacgggagtgcgggtgtttcacgattacatgaaaaataaacagcaacaagttgatgagtttgctgaattattggcgttggaacagcgctattgccggcaggagccctttatcagtttggggcgctacgtgcatgtcatggcgtttaagccgaatctgaaggacccattatga

SEQ ID NO: 155694 - protein, 261 aa, Yersinia enterocolitica subsp. enterocolitica 8081
MQDRNFDDIAEKFSRNIYGTTKGMIRQAVVWQDITGLLAQLPQRPLRILDAGGGEGHMACQLAALGHQVLLCDLSAEMIQRAKIAAEEKGVSHNMQFVQSAAQDITQHLAQPVDLILFHAVLEWIAEPQQVLQILFNALNPGGALSLMFFNANGLVMRNAVLGNFQLAIPGVKRRRQRSLSPQYPLDPPTVYGWLEQMGLSISGKTGVRVFHDYMKNKQQQVDEFAELLALEQRYCRQEPFISLGRYVHVMAFKPNLKDPL

SEQ ID NO: 155695 - DNA, 774 bp, Shewanella baltica OS155
  CDS (1)..(774): transl_table=11
atgcaagataagaattttgacaagctcgcgcaaaaatttgcgaaaaacatttatggtacgcctaaaggcgacattcgtgccgctgtactgtggcgcgacctcgcacctgcgctagcaaaactgggggatagaaaactcagagtattagatgcgggcggcggttttggttactttagccaaaaattagcccgcctcggccacgaagtggtgctgtgcgatatctcagcggagatgttggcgcaagcgcaagagcagatagatgcatcacctgaaccattagctatccagcttatccatgcgcctattcaagcactgtcggtcgagcaacatggctatttcgatatcatattgtgccatgccgtcgtcgaatggttaacggatgctaagcccacgatggcgggcctactcactatgctcaaacccgctggattattctctttgatgttttacaacaaagaagccatgcgctttcatgccttagtgtcgggcaatttcgattacgtcgccgcagatttaaaagtaaagaagaaagtacagctaacacccactcatccactttatattcaagaggttaaagagtggtttagcgattggcaaatgtcactcatcagccagtccggcgtgcgggtgatccacgactatttgaaaaagagtcagccagtggatttcgattatcaaaaactgctgcaaatggagctcgagtattcacaacgcgagccctatatttccctcggccgatatgtacactttttagggcaaagcccagcagtttaa

SEQ ID NO: 155696 - protein, 257 aa, Shewanella baltica OS155
MQDKNFDKLAQKFAKNIYGTPKGDIRAAVLWRDLAPALAKLGDRKLRVLDAGGGFGYFSQKLARLGHEVVLCDISAEMLAQAQEQIDASPEPLAIQLIHAPIQALSVEQHGYFDIILCHAVVEWLTDAKPTMAGLLTMLKPAGLFSLMFYNKEAMRFHALVSGNFDYVAADLKVKKKVQLTPTHPLYIQEVKEWFSDWQMSLISQSGVRVIHDYLKKSQPVDFDYQKLLQMELEYSQREPYISLGRYVHFLGQSPAV

SEQ ID NO: 155697 - DNA, 855 bp, Shewanella loihica PV-4
  CDS (1)..(855): transl_table=11
atgcgcgtcgcccccgcctatggcaaaatagccctcctaatttcagtcagcttttcccatgggcgtcactcagtgcaagacaaaaacttcgatgcattagccggtaaatttgccaaaaacatctacggcacgcctaagggcgaagtccgcgccgccgtgctgtggcgggatatctcccaggccatgacacaactgcccgaggggccactgcgtattctggacgccggcggcggcttcggcttcttcagccagaagctggccaagcttggccatagcgtcactctgtgcgatatctccagcgaaatgttggccctgggtcaggcgcagataacagagtatgaaaataatagcggtgagaagctggacatcacactgctgcacgcaccgatacaatccctgacccgggaagagcttggccagttcgacctcatcctctgccatgcggtggccgagtggctcagcgatgccaagcagaccctggccggtctgacccagctgttaaaaccccaggggctgttttccctcatgttctacaacaaggaggcgatgcgctttcacagcctgatctcgggtaacttcgactatgtggcggcggatttcaaggtgaagaagaaggtgggcctaaccccaagctatcccctctatatcgacgatgtgcgaggttgggtgagtgattggcagatggagctggtgacggcctccggcgtgcgggtgatccacgactatctcaagacccaccagccccctaattcagatttcagccagctgctggagatggagctgcaatactcgacccaccccgcctacataggcctggggcgctacgttcacttcatcacccgttggcaaagatag

SEQ ID NO: 155698 - protein, 284 aa, Shewanella loihica PV-4
MRVAPAYGKIALLISVSFSHGRHSVQDKNFDALAGKFAKNIYGTPKGEVRAAVLWRDISQAMTQLPEGPLRILDAGGGFGFFSQKLAKLGHSVTLCDISSEMLALGQAQITEYENNSGEKLDITLLHAPIQSLTREELGQFDLILCHAVAEWLSDAKQTLAGLTQLLKPQGLFSLMFYNKEAMRFHSLISGNFDYVAADFKVKKKVGLTPSYPLYIDDVRGWVSDWQMELVTASGVRVIHDYLKTHQPPNSDFSQLLEMELQYSTHPAYIGLGRYVHFITRWQR

SEQ ID NO: 155699 - DNA, 777 bp, Aeromonas salmonicida subsp. salmonicida A449
  CDS (1)..(777): transl_table=11
ttgaagcaagatcagagttttgacgggcgtgccgacaagtttgctcgcaacatttatgactccaccaaggggcgtattcgcaccactgtggtctggagcgacattgaagcctgcctggctcgccttggcaaccggcccctgcgcatcctggatgcggggggcggatttggctattttgcccagaagctggcggccatgggtcatcaggtggagctgtgcgatctctccgccgaaatgcttgaacttgcacgggtccagatcgctgaaaaggggctggaagacagaattcgtctcatccattgccccattcaggatctcaaggcccacgtgaccggcacctttgatctggtgctctgtcacgccgtgctggagtggctcgccgagccgcgccagaccctgctcggtctgttccctttcgtcaatgcagggggcatactgtcgctgcttttttacaaccgtcatggtctgttgtttcagagtctggtggtgggcaatttcgattatgtgcgccttggcctgcgcaagaagcgccagaccgccctgacccccaccaatccgcagttgcctgaacaggtctacgactggattgggcgagggggcctcaagatcattggcaagacgggggtgcgggtcattcacgactacatgcgccataagcaggatcaggtcgagaagttcgatgatctgctggccatggagcagcaatattgtcgccaggagccgtttatctccctgggtcgctatatccatgtgatggcgcagaaaccgtcaagctga

SEQ ID NO: 155700 - protein, 258 aa, Aeromonas salmonicida subsp. salmonicida A449
MKQDQSFDGRADKFARNIYDSTKGRIRTTVVWSDIEACLARLGNRPLRILDAGGGFGYFAQKLAAMGHQVELCDLSAEMLELARVQIAEKGLEDRIRLIHCPIQDLKAHVTGTFDLVLCHAVLEWLAEPRQTLLGLFPFVNAGGILSLLFYNRHGLLFQSLVVGNFDYVRLGLRKKRQTALTPTNPQLPEQVYDWIGRGGLKIIGKTGVRVIHDYMRHKQDQVEKFDDLLAMEQQYCRQEPFISLGRYIHVMAQKPSS

SEQ ID NO: 155701 - DNA, 1083 bp, Pseudomonas stutzeri A1501
  CDS (1)..(1083): transl_table=11
ttgtcgtctttcgaacagcctgccttccctgatgaacatcgaacagatcacccagcgcctgcacgcgatccgcgatcgcaacgactggcagcgctttcacagcccgaagaacctcgccatggccgccagtgtggaaatggccgagctggtggaaatcttccagtggcagaccgaggacgagtcgcgccagctatcggccgacaagctcgagcacgcgggccaggaggtcggcgacatcctcatgtacctgctgctggtgtgcagcgagctggggatcgacatggaacaggcgctgctggacaagctggccgacaacgagcggcgcttcgtccgatgagcgaccgccatttcgacgagctggcgacgcgtttcgccgagaagatctacggcggcgccaagggcgcgatccgcctggccgtgctgcaggccgacctggccgagatcctgccgccgcgcccgctgcgggtgctggacatcggcgccgggctcggccatatgagcctctggctggcgcagcagggccatgcggtcaccctcgccgagcccgccgaaccgatgctgcaaggcgcccgccagcagttcgccgacgctggtcagcaggccaccttcatccaggcgccctggcaggaggtgcaagcgcatgtcgacggccgcttcgatctggtcatctgccacgccgtgctggagtggctcgccgagccccaggcgatcctgccggtgctgcaccgcctgaccgcggccgatggttggctgtcgctggccttctacaaccgcgatgcgctgatctatcgcaacctgctcaagggccacttcaagaagctgcgcagccagacctatgccggcgaacggcagagcctgaccccgcagcaaccgctggacccacgcgaactggctgcgcaactcgcgccgcactggcaggtcgaattcagcagtggcgtgcgcgttttccatgactacatgcccgccgatttccaggcccgcaccgagccggccgacctcatcgagatggagctggcctaccgccgccatcccaccttcgccggcctcgggcgctatctgcactggttgtgccggccacgctga

SEQ ID NO: 155702 - protein, 360 aa, Pseudomonas stutzeri A1501
MSSFEQPAFPDEHRTDHPAPARDPRSQRLAALSQPEEPRHGRQCGNGRAGGNLPVADRGRVAPAIGRQARARGPGGRRHPHVPAAGVQRAGDRHGTGAAGQAGRQRAALRPMSDRHFDELATRFAEKIYGGAKGAIRLAVLQADLAEILPPRPLRVLDIGAGLGHMSLWLAQQGHAVTLAEPAEPMLQGARQQFADAGQQATFIQAPWQEVQAHVDGRFDLVICHAVLEWLAEPQAILPVLHRLTAADGWLSLAFYNRDALIYRNLLKGHFKKLRSQTYAGERQSLTPQQPLDPRELAAQLAPHWQVEFSSGVRVFHDYMPADFQARTEPADLIEMELAYRRHPTFAGLGRYLHWLCRPR

SEQ ID NO: 155703 - DNA, 777 bp, Enterobacter sp. 638
  CDS (1)..(777): transl_table=11
atgcgggatcgcaatttcgatgacatcgcggaaaagttttcgcgcaatatttacggcaccaccaaagggcagttgcgtcagacgatcctctggcaggatctggatacgctgcttgccacctacggtagccgaaagttgcgcgttctcgatgccggcggcggtgaaggtcagacggccattttaatggccgagcgcggtcatcacgtgacgttttgcgatctttccgctgagatggtcgcacgcgcgaaacgcgcggcacacgagaaaggtgtgagcgacaacatgcattttatacattgcgccgctcaggacattgcccagcatttggaaacgcaggttgatctgatattgtttcacgcggtacttgaatgggtcgctgaaccgcaagctatgttaaacacgctgtggactgtgctaagccccggcggcgcactgtcgctgatgttctacaatgccaatggcctattgatgcgcaatgtgctggtgggcaatttcggttatgtgcagcagggcatgtataaaaagaaacgacgcacgctttcgccagattttccgcgcgatccccagcaagtctatggctggctggaggagattggctgggaaattaccggcaaaacgggcgtcagggtgtttcatgattatctgcgcgataaacaaaaacagcatgaatgtctggacgccttaacagaaatagaaacgcggtattgccgccaggagccgtttgtgagccttggccgctatatacacgtcaccgcgattaaaagcctggaccgttag

SEQ ID NO: 155704 - protein, 258 aa, Enterobacter sp. 638
MRDRNFDDIAEKFSRNIYGTTKGQLRQTILWQDLDTLLATYGSRKLRVLDAGGGEGQTAILMAERGHHVTFCDLSAEMVARAKRAAHEKGVSDNMHFIHCAAQDIAQHLETQVDLILFHAVLEWVAEPQAMLNTLWTVLSPGGALSLMFYNANGLLMRNVLVGNFGYVQQGMYKKKRRTLSPDFPRDPQQVYGWLEEIGWEITGKTGVRVFHDYLRDKQKQHECLDALTEIETRYCRQEPFVSLGRYIHVTAIKSLDR

SEQ ID NO: 155705 - DNA, 774 bp, Shewanella putrefaciens CN-32
  CDS (1)..(774): transl_table=11
atgcaagataagaattttgataagctcgcgcacaagtttgcgaaaaatatttatggcacccccaaaggggaaattcgtgcagccgtactatggcgagatctcagctctgcgttagccccatttggcgataaaaaactccgaattttagatgctggcggtggctttggtttctttagccaaaagctggcacgccttggccatgaagtcgtactttgcgatatctcacaagagatgcttatccaagcccaagcacatattgatgcctctaccgagcctttaaatattgagcttatccatgcccctatccaagcattatcagttgaacagaatggtgttttcgatctcatactgtgccatgccgtagtcgaatggcttaccgatgctcagcgtactatggaaggattgctgacgatgctcaaacccaatggtttgttttcactgatgttttataacaaagaagcaatgcgtttccatgccttaatatcaggaaattttgactacgtggccgcagatcttaaagtaaagaaaaaagtgaggctaacacccacacacccgctttatattcaagaggttaagcaatggtttatggattgggaaatgacgttaataagccaatctggggtgagggttattcacgattacttgaaaaagagccaagccgcagattttgattaccaaaaacttctgcagatggaactcgaatattcccagcacgagccgtatatatcacttggcagatatgtccatttcttaggtattagtcgaggaacatag

SEQ ID NO: 155706 - protein, 257 aa, Shewanella putrefaciens CN-32
MQDKNFDKLAHKFAKNIYGTPKGEIRAAVLWRDLSSALAPFGDKKLRILDAGGGFGFFSQKLARLGHEVVLCDISQEMLIQAQAHIDASTEPLNIELIHAPIQALSVEQNGVFDLILCHAVVEWLTDAQRTMEGLLTMLKPNGLFSLMFYNKEAMRFHALISGNFDYVAADLKVKKKVRLTPTHPLYIQEVKQWFMDWEMTLISQSGVRVIHDYLKKSQAADFDYQKLLQMELEYSQHEPYISLGRYVHFLGISRGT

SEQ ID NO: 155707 - DNA, 750 bp, Pseudomonas mendocina ymp
  CDS (1)..(750): transl_table=11
atgagcgaccgccacttcgacgaactcgccacccgcttcgccgagaagatctacggcggcgccaagggtgccatccgcctggccgtgctgcaggccgacctggccgaagcgctgccggaccgcccgctgcgggtgctggatgtcggtgccggtctcggtcacatgagtctgtggctggccgggcgcggccatgacgtcaccctggccgaacccgccgagcccatgctcgaaggggcgcgccagcgcttcgccgaggccgggcagcgcgccaccttcatccaggcgccctggcaggagctgctcggccgactcgatcagccctatgacctggtgctgtgccacgccgtgctggagtggctggccgaaccgggcgccatcctgccggtgctgcaccagctgacggccaagggcggctggctgtcgctggccttctacaacaaggacgcactgatctaccgcaacctgctcaagggacattttcgcaagctgcgcaaggaacgcttcgccggcgagggccagagcctgaccccgcagcgcccgctcgacccgcgcgagctggccacgcaactcggcgagcactggcaggtcgaaagccgtagcggcgtgcgcgtgttccacgactacatgccgcaggaatttcaggccaaggctgagctcatcgacctgctggaaatggagctggcgcatcgccgccaccccgccttcgccggcctcggccgctacctgcactggatctgccggcccctctga

SEQ ID NO: 155708 - protein, 249 aa, Pseudomonas mendocina ymp
MSDRHFDELATRFAEKIYGGAKGAIRLAVLQADLAEALPDRPLRVLDVGAGLGHMSLWLAGRGHDVTLAEPAEPMLEGARQRFAEAGQRATFIQAPWQELLGRLDQPYDLVLCHAVLEWLAEPGAILPVLHQLTAKGGWLSLAFYNKDALIYRNLLKGHFRKLRKERFAGEGQSLTPQRPLDPRELATQLGEHWQVESRSGVRVFHDYMPQEFQAKAELIDLLEMELAHRRHPAFAGLGRYLHWICRPL

SEQ ID NO: 155709 - DNA, 807 bp, Dichelobacter nodosus VCS1703A
  CDS (1)..(807): transl_table=11
atggtagtagcacacaatccaaccgagacgaatcctgatcatcattattttgaagaaatcggcgaccattttttaaaacagatttattacaacaataaaggacgcattcgtcttgccgttttaaaacgcgatttggcgccttttatgcgcactccaaaaccattagaaattttggatatcggcgccggcgctggacaaatggcactttggtgcgctgcttttggacatcgcgtgacgctttttgatgcgtccgagcggctgcttgctcaagcgcaaaaacaagcacaaaaagaatctttaaacgcacaatgcacttttatttgcggtgaaattacgcaaatgcccgatgttttgggcgcgcggcaatttgattttgtgctttctcacgccgttttagaatggctggaagacggcgcgcaattatttgaacgttgtcaacaatatttaaagcctaacggattgttatcattgatgtattacaaccgcagcgctttagaattcattcaacacgtttttggtaatttttcttatgttgattcgggattagttgccaaaaaaacggcgaaactcacccctaaatatccccgaagcagcgattgggttgccgcgcaattaggcgcattaccgcttaaaaaacaaagcggtatccgctgcttttacgattatatgaaacccgaagaccgcgctgccaatagtattgaaagcatcatcgctcatgaattatcgctatcgctgcgccgcgaatttttgccagtagcgcgttatattcatgaaatacggcaacgcaccatctcaaccgctaactga

SEQ ID NO: 155710 - protein, 268 aa, Dichelobacter nodosus VCS1703A
MVVAHNPTETNPDHHYFEEIGDHFLKQIYYNNKGRIRLAVLKRDLAPFMRTPKPLEILDIGAGAGQMALWCAAFGHRVTLFDASERLLAQAQKQAQKESLNAQCTFICGEITQMPDVLGARQFDFVLSHAVLEWLEDGAQLFERCQQYLKPNGLLSLMYYNRSALEFIQHVFGNFSYVDSGLVAKKTAKLTPKYPRSSDWVAAQLGALPLKKQSGIRCFYDYMKPEDRAANSIESIIAHELSLSLRREFLPVARYIHEIRQRTISTAN

SEQ ID NO: 155711 - DNA, 783 bp, Vibrio cholerae O395
  CDS (1)..(783): transl_table=11
atgacagaagatcgcaatttcgacgatattgcccacaaatttgcaaaaaatatatacggttctgacaaaggtgagatccgccaattcattgtttgggaagatttggagcagcttctcagtcaactggacacgcaaaaagttcccttgcacgtgctcgatgcgggtggcggcttggcgcaagtatcgcaaaaaatcgctcgccttgggcatcgagtgacactctgtgatctttcttcggaaatgttgcaattggccgaacaggatattgcaaacaatggtctgcttgagaagtatcgcttcgtccattcaccagtgcagacgattcaagcacaccttgatgcgcccgtggatttggtgctgtttcatgcggtgatggaatggttagcggaacctaaaccagcgttgcaaaatttgctggcgcaagtcagaccgggcggcatggtgtcggtgatgttttacaactatcacggtttggtttacaaaaacgccgtgtgtggcaacattccgcacgtgctagaggatatgccgcaccgcaaacggtttaaattacaaccgcagaaaggcttgctccccgaagaagtctaccaatggatcgaagaatcgggttttgagatctgcgggaaatccggtattcgttgtttcagtgattacatcggaaacatgaaaaacatgggcgaataccagtatgaggatttggtggcactggagcgcaaattctgccgtcaggagccttacctctcattgggtcgatacattcacgtatgggctaagaaaaaacaataa

SEQ ID NO: 155712 - protein, 260 aa, Vibrio cholerae O395
MTEDRNFDDIAHKFAKNIYGSDKGEIRQFIVWEDLEQLLSQLDTQKVPLHVLDAGGGLAQVSQKIARLGHRVTLCDLSSEMLQLAEQDIANNGLLEKYRFVHSPVQTIQAHLDAPVDLVLFHAVMEWLAEPKPALQNLLAQVRPGGMVSVMFYNYHGLVYKNAVCGNIPHVLEDMPHRKRFKLQPQKGLLPEEVYQWIEESGFEICGKSGIRCFSDYIGNMKNMGEYQYEDLVALERKFCRQEPYLSLGRYIHVWAKKKQ

SEQ ID NO: 155713 - DNA, 804 bp, Psychrobacter sp. PRwf-1
  CDS (1)..(804): transl_table=11
atgagtgcagataaagaccgtaactttgatcccatcaccgagcattttgtcaaaaaagtctatggcggcttaaaaggggagattcgtctggcagtgctcaagcgcgacttggctcagacagtcgagcagctatccgctcagttaaagcggccgttaaaaatacttgatgtgggagctggattggctcagttgtcattgcagctggccgctcaaggtcacatagttacgatcaatgacatctcagacaacatgctcactgaggccaaaaaaagtgctgaacaattgggcgtgttgactcaagtaatctggttagtctgcccctatcaacagcttgaggacttgcttggggagcacaacaaacaaagctatgacttgattttgtgtcatgcgctgcttgaatggttggctgagccgcaacagattatgccattttttgcacagtggcttgcacccaccggcgtactgtcgctgtgcttttataaccccgcaagcttcatataccgcaatctgattatgggcaattttaacttgctcaataaccccaatttcaaatcagacaacaaaaaaagcctgacacccaataaccccgtcagctatgaagaagctgacgcttggctaaaggcgcaaggctttatgattgataaagtaagcgggctgcgtgtgtttcatgactatgcgccgctaaaacgtggtggtcacaccaatcctgaggctgtaattgatatggagctgcgctattcagatcaaaccccttataaatggctggggcgttacctgcatgttcaggcctcttttgatgcttaa

SEQ ID NO: 155714 - protein, 267 aa, Psychrobacter sp. PRwf-1
MSADKDRNFDPITEHFVKKVYGGLKGEIRLAVLKRDLAQTVEQLSAQLKRPLKILDVGAGLAQLSLQLAAQGHIVTINDISDNMLTEAKKSAEQLGVLTQVIWLVCPYQQLEDLLGEHNKQSYDLILCHALLEWLAEPQQIMPFFAQWLAPTGVLSLCFYNPASFIYRNLIMGNFNLLNNPNFKSDNKKSLTPNNPVSYEEADAWLKAQGFMIDKVSGLRVFHDYAPLKRGGHTNPEAVIDMELRYSDQTPYKWLGRYLHVQASFDA

SEQ ID NO: 155715 - DNA, 813 bp, Klebsiella pneumoniae subsp. pneumoniae MGH 78578
  CDS (1)..(813): transl_table=11
atggagtcactcgtgcaggatcgcaatttcgatgacattgctgaaaagttttcgcgcaatatttacggcaccacaaaaggccagttgcgtcaggcgatcctctggcaggatctggaaccgctgttggcgcagctggggccgggaccgctgagggtgctggatgccggcggcggcgaagggcaaacggccatcaaagtcgcgcaactgggccatcacgtgacgctgtgcgatctctccgctgagatggtggctcgcgcccgccaggcggccgccgataaaggtgtgatcgacaacatgcattttgtacaatgcgcggctcaggatattgcgcagcatttggaaagcccggtcgatctggtactgtttcatgcggtgctggagtgggtggcggagccccaggaaatactgcataccctgtggtcgacgctgcgtgctggcggtggactgtcattgatgttctacaatgctaacggcctgttgatgcacaatatggttgccggtaattttgattacgttcaactgggcatgccaaaaaagaaaaaacgcacgctgtcgccggattatccgcgtgaaccacagcaggtttatcactggctggaagagattggctggcagatcgtcagcaaaaccggcgtgcgggtgtttcatgattatctgcgtgaaaaacgccaacagcatgacagctatgcggcgctgctggcgctggagacgcgctactgtcgtcaggagccgtatctcagcctgggccgttatattcatgtcaccgcgcttaagagccaggctcatagccgcagatgcaaggataaagtatga

SEQ ID NO: 155716 - protein, 270 aa, Klebsiella pneumoniae subsp. pneumoniae MGH 78578
MESLVQDRNFDDIAEKFSRNIYGTTKGQLRQAILWQDLEPLLAQLGPGPLRVLDAGGGEGQTAIKVAQLGHHVTLCDLSAEMVARARQAAADKGVIDNMHFVQCAAQDIAQHLESPVDLVLFHAVLEWVAEPQEILHTLWSTLRAGGGLSLMFYNANGLLMHNMVAGNFDYVQLGMPKKKKRTLSPDYPREPQQVYHWLEEIGWQIVSKTGVRVFHDYLREKRQQHDSYAALLALETRYCRQEPYLSLGRYIHVTALKSQAHSRRCKDKV

SEQ ID NO: 155717 - DNA, 750 bp, Pseudomonas aeruginosa PA7
  CDS (1)..(750): transl_table=11
atgagtgaccgccacttcgacgagttggcgacgcgcttcgccgaaaagatctacggcggcgccaagggcgcgatccgcctcgcggtgctccaggcggacctcgccgaggcgctgccgcagcggccgctgcgggtcctcgacatcggcgccgggctcggccacatgtcgctctggctggccactcgcggccaccgcgtgaccctcgccgagccggcgctacccatgctcgacggcgcccgccagcgcttcgccgaggccgggcaggccgccgaattcatccaggcgccctggcaggaactgcccggccagctcaccgagccctacgacctggtactctgccacgccgtgctcgagtggctggccgaaccccatgcgatcctgccagtgctgcaccgactctgcgcacccggcggctggctgtcgctggccttctacaaccgcgatgcgctgatctaccgcaacctgctcaagggccacttccgcaagctgcgcaaggaacgcttcgccggcgaggggcggagcctgaccccacagcgcccgctcgacccgcgcgagctggaacaggcgctggaaacgcgctggcgcatcgaggcgcgcagcggcgtacgggtgttccacgactacatgccgagcgagttccaggccaaggccgagccgctcgacctggtggaaatggaactggcctaccgccgccatccggccttcgccgggctcggtcgctacctgcactggctgtgccgaccgcaatga

SEQ ID NO: 155718 - protein, 249 aa, Pseudomonas aeruginosa PA7
MSDRHFDELATRFAEKIYGGAKGAIRLAVLQADLAEALPQRPLRVLDIGAGLGHMSLWLATRGHRVTLAEPALPMLDGARQRFAEAGQAAEFIQAPWQELPGQLTEPYDLVLCHAVLEWLAEPHAILPVLHRLCAPGGWLSLAFYNRDALIYRNLLKGHFRKLRKERFAGEGRSLTPQRPLDPRELEQALETRWRIEARSGVRVFHDYMPSEFQAKAEPLDLVEMELAYRRHPAFAGLGRYLHWLCRPQ

SEQ ID NO: 155719 - DNA, 774 bp, Shewanella baltica OS185
  CDS (1)..(774): transl_table=11
atgcaagataagaattttgataagctcgcgcaaaaatttgcgaaaaatatttatggtacgcctaaaggcgacattcgtgccgctgtactgtggcgcgacctcgcacctgcgctagcaaaactgggggatagaaaactcagagtattagatgcgggcggcggttttggttactttagccaaaaattagcccgcctcggccacgaagtggtgctgtgcgatatctcagcggagatgttggcgcaagcgcaagaacagatagatgcctcgcctgaaccattagctatccagcttatccatgcgcctattcaagatctgtcagttgagcaacatggctatttcgatatcatattgtgccatgccgtcgtcgaatggttaacggatgctaagcccacgatggcgggcctactcactatgcttaaacccgcgggattattctctttgatgttttacaacaaagaggccatgcgttttcatgccttagtgtcgggtaatttcgattacgtcgccgcagatttaaaagtgaaaaagaaagtgcggctaacacccactcatccactttatattcaagaggttaaagagtggtttagcgactggcaaatgtcactcatctgtcagtctggcgtgcgggtgatccacgactatttgaaaaagagtcagcccgccgatttcgattatcaaaaactgctacaaatggagctcgagtattcacaacgcgagccctacatttccctcggccgatatgtgcactttttagggcaaagccccgcagtttga

SEQ ID NO: 155720 - protein, 257 aa, Shewanella baltica OS185
MQDKNFDKLAQKFAKNIYGTPKGDIRAAVLWRDLAPALAKLGDRKLRVLDAGGGFGYFSQKLARLGHEVVLCDISAEMLAQAQEQIDASPEPLAIQLIHAPIQDLSVEQHGYFDIILCHAVVEWLTDAKPTMAGLLTMLKPAGLFSLMFYNKEAMRFHALVSGNFDYVAADLKVKKKVRLTPTHPLYIQEVKEWFSDWQMSLICQSGVRVIHDYLKKSQPADFDYQKLLQMELEYSQREPYISLGRYVHFLGQSPAV

SEQ ID NO: 155721 - DNA, 786 bp, Yersinia pseudotuberculosis IP 31758
  CDS (1)..(786): transl_table=11
atgcaggatcgcaatttcgatgatattgctgaaaaattttcccgcaatatctacggtacgacgaagggaatgattcgtcaggcggtggtgtggcaagatatcactgagttgttgacgcagttaccaccgcgtccgctacggattctagatgcgggcggcggtgagggtcatatggcatgccaactggcggccttaggccatcaggtgctgttgtgcgacttatctgctgaaatggtccagcgcgcaaaagcggcagctcacgaaaaaggtgtgagccacaacatgcaatttatacaaagtgcagcgcaggacattcgtcaacatttagaacaacccgttgatctgatattgttccatgcggtattagaatggattgctgaacctcagcaggttctgcaaatactttttgatacgctaaaaccgggaggcgcactgtcgttgatgtttttcaatgccaacggattggtgatgcgtaatgcggtattgggcaactttcagttagccattcccggcgttaaacggcgtcggcaacgttcgttgtcaccgcaataccctttagacccaccaacggtatacggttggcttgagcaaatggggttatccattaggggtaaaacaggagtacgggtatttcacgattacatgaaaaataaacagcaacaagttgatgagtttgctgaattattagcgttggaacagcgctattgccggcaagagccctttattagtttggggcgctacgtgcatgttatggcgtttaagccgaatctgaaggacccattatga

SEQ ID NO: 155722 - protein, 261 aa, Yersinia pseudotuberculosis IP 31758
MQDRNFDDIAEKFSRNIYGTTKGMIRQAVVWQDITELLTQLPPRPLRILDAGGGEGHMACQLAALGHQVLLCDLSAEMVQRAKAAAHEKGVSHNMQFIQSAAQDIRQHLEQPVDLILFHAVLEWIAEPQQVLQILFDTLKPGGALSLMFFNANGLVMRNAVLGNFQLAIPGVKRRRQRSLSPQYPLDPPTVYGWLEQMGLSIRGKTGVRVFHDYMKNKQQQVDEFAELLALEQRYCRQEPFISLGRYVHVMAFKPNLKDPL

SEQ ID NO: 155723 - DNA, 780 bp, Cronobacter sakazakii ATCC BAA-894
  CDS (1)..(780): transl_table=11
atgcgggatcgcaattttgatgacatcgccgaaaagtttgcgcgcaacatttacggtacaacaaaaggccagttgcgtcaggctatcctctggcaggatctcgacgcgttgttaggcctgttgcctgaccgtccactgcgcgtactggatgcaggcggtggcgaagggcaaaccgcgtgtcgcattgcgcagcggggtcatcaggtggtgctgtgcgatctctctgcggaaatgatagctcgtgctcaaaaggcggcgcaggagaaaggtgtgagcggcaacatgcattttgtacaatgcgccgcgcaggaggcgggtcagcatttggaaagcccggttgatctgatattgtttcacgctgtgctggaatgggtggccgatccaaaggcggcgctgcgtcatttatgggaatgtctggcgccgggcggcgcgctctcgctgatgttctacaacgccaacggccttctgatgcataacatggtggcaggcaacttcgcgtatgtgcagcagggcatgcccaaaaagaaaaaacgcactctttcgccggattatccgcgcgagccgcagcaggtttatcgctggcttgaagagatgggctggcagatccacagcaaaaccggcgtgcgggtgtttcatgactatctgcgtgaaaaacatcagcagcgcgacgagtatgaaacgctgcttgagcttgaaacgcgttactgccgacaggagccctgggtgagcctgggccgatacatccatgtcactgcgtttaagccggagatccaaggataa

SEQ ID NO: 155724 - protein, 259 aa, Cronobacter sakazakii ATCC BAA-894
MRDRNFDDIAEKFARNIYGTTKGQLRQAILWQDLDALLGLLPDRPLRVLDAGGGEGQTACRIAQRGHQVVLCDLSAEMIARAQKAAQEKGVSGNMHFVQCAAQEAGQHLESPVDLILFHAVLEWVADPKAALRHLWECLAPGGALSLMFYNANGLLMHNMVAGNFAYVQQGMPKKKKRTLSPDYPREPQQVYRWLEEMGWQIHSKTGVRVFHDYLREKHQQRDEYETLLELETRYCRQEPWVSLGRYIHVTAFKPEIQG

SEQ ID NO: 155725 - DNA, 792 bp, Vibrio harveyi ATCC BAA-1116
  CDS (1)..(792): transl_table=11
atgacagaagaccgcaatttcgacgatatcgcccacaaatttgcaaaaaatatttacggctccgataaaggggagatccgtcaaatcattgtgtgggaagattttctacagattctaagtgaattaggcgccgaccatcaagctctacaagtccttgatgctggtggtggtttagcacaaatgtcgcaaaagcttgctaagctcggacatcatgtcgctttgtgtgatctatcttcggaaatgctgcaactagcgaaacaggatattgaaaaaaacggtttgcttgagcagtatcgcctgattcattcgcctgtccaatccattggtgatcacatggaagcgcaggtggaccttgtcatgttccatgctgtcatggagtggttggtagacccgaaaaccgcactcgaaaccgttttggaacaggtcaagccggggggcatcgcttcggttatgttctataaccaccacggcttagtctataaaaatgtggtttgtggcaacattcctcatgttttagacggcatgcctcaccgaaaaagatttaaactacagccacaaaaaggcctaaaacccgaagaggtctataaatggatagaagattctggttttagtatttgtggaaaatctggtattcgttcattcagtgattacataggcaatatggaatacatgggcgattacgagtttgaagatgtgttggcgctagaaaaacaactttgtcgacaagagccatacctctcattaggccgctatattcatgtgtgggctaagaagaacgataaacaggaataa

SEQ ID NO: 155726 - protein, 263 aa, Vibrio harveyi ATCC BAA-1116
MTEDRNFDDIAHKFAKNIYGSDKGEIRQIIVWEDFLQILSELGADHQALQVLDAGGGLAQMSQKLAKLGHHVALCDLSSEMLQLAKQDIEKNGLLEQYRLIHSPVQSIGDHMEAQVDLVMFHAVMEWLVDPKTALETVLEQVKPGGIASVMFYNHHGLVYKNVVCGNIPHVLDGMPHRKRFKLQPQKGLKPEEVYKWIEDSGFSICGKSGIRSFSDYIGNMEYMGDYEFEDVLALEKQLCRQEPYLSLGRYIHVWAKKNDKQE

SEQ ID NO: 155727 - DNA, 786 bp, Serratia proteamaculans 568
  CDS (1)..(786): transl_table=11
atgcaggatcgcaattttgacgatattgctgaaaagtttgcgcgtaatatttacggcaccaccaaagggaaaatccgccaggctgtggtttggcaggatctgaccacgctgttggcccagttgccgcagcggccgctgcgcattctggatgccggcggtggcgaaggccatatggcctgccaattggcagaattaggacatcaggtgttgttgtgcgatctttctggtgagatgatccaacgcgccgcgttgctggctgagcagaaaggtgtgagccagaacatgcaattcatacaaagttcagcccaggatattggtcaacacttggaacagccggttgatctgatattgttccatgcggtgcttgaatggatcgccgaacctgaggctgcgctgcaggcgttatttaattgcctgttgccgggtggcgcactgtcattgatgttctttaacgccaatggcctcttgatgcgtaacgtggtgttgggtaatttccaactggtgaacccagaggtcagaagacgcagaaagcgttcgctgtcgccgcagtacccgcatagtccaccgcaggtgtacggctggctggaacagttgggcatgcgcatcagcgggaaaaccggcgtgcgggtgttccacgattatctgcagagcaggcagttacagacacaaaaatttgaagagttactggcgcttgaacagcactattgccggcaggagccgtacgtgagtttggggcgctatattcacgtcatggcgcataaaccaaacctgaaggacgaactatga

SEQ ID NO: 155728 - protein, 261 aa, Serratia proteamaculans 568
MQDRNFDDIAEKFARNIYGTTKGKIRQAVVWQDLTTLLAQLPQRPLRILDAGGGEGHMACQLAELGHQVLLCDLSGEMIQRAALLAEQKGVSQNMQFIQSSAQDIGQHLEQPVDLILFHAVLEWIAEPEAALQALFNCLLPGGALSLMFFNANGLLMRNVVLGNFQLVNPEVRRRRKRSLSPQYPHSPPQVYGWLEQLGMRISGKTGVRVFHDYLQSRQLQTQKFEELLALEQHYCRQEPYVSLGRYIHVMAHKPNLKDEL

SEQ ID NO: 155729 - DNA, 774 bp, Shewanella baltica OS195
  CDS (1)..(774): transl_table=11
atgcaagataagaattttgacaagctcgcgcaaaaatttgcgaaaaatatttatggtacgcctaaaggcgacattcgtgccgcggtactgtggcgcgacctcgcacctgcgctagcaaaactggggaatagaaaactcagagtattagatgcaggcggtggttttggttactttagccaaaaattagcccgcctcggccacgaagtggtgctgtgcgatatttcagcggagatgttggcgcaagcgcaagaacagatagatgcttcgtctgaaccattagctatccagcttatccatgcgcctattcaagcactatcggtcgagcaccatggctatttcgatatcatattgtgccatgcggtcgtcgaatggttaacggatgctaagcccacgatggcgggcctactcactatgcttaaacctgcgggaatattctctttgatgttttacaacaaagaggccatgcgttttcatgccttagtgtcgggtaatttcgattacgtcgccgcagatttaaaagtgaaaaagaaagtgcggttaacacccacacatccactttatattcaagaggttaaagagtggtttaacgagtggcagatgtcactcatcagccagtccggcgtgcgggtgatccacgactatttgaaaaagagtcagccagcggatttcgattatcaaaaactgctgcaaatggagctcgagtattcacaacgcgagccctacatttccctcggccgatatgtacactttttagggcaaagcccagcagtttga

SEQ ID NO: 155730 - protein, 257 aa, Shewanella baltica OS195
MQDKNFDKLAQKFAKNIYGTPKGDIRAAVLWRDLAPALAKLGNRKLRVLDAGGGFGYFSQKLARLGHEVVLCDISAEMLAQAQEQIDASSEPLAIQLIHAPIQALSVEHHGYFDIILCHAVVEWLTDAKPTMAGLLTMLKPAGIFSLMFYNKEAMRFHALVSGNFDYVAADLKVKKKVRLTPTHPLYIQEVKEWFNEWQMSLISQSGVRVIHDYLKKSQPADFDYQKLLQMELEYSQREPYISLGRYVHFLGQSPAV

SEQ ID NO: 155731 - DNA, 804 bp, Salmonella enterica subsp. arizonae serovar 62:z4,z23:--
  CDS (1)..(804): transl_table=11
atgcaggatcgcaattttgatgacattgctgaaaagttttcccgtaacatttacggcacgaccaaaggacaactgcggcaagccattctgtggcaagacctggatcgcgtgctggaggagattggcgggcgaaaactgcgggtactggatgccggcggcggcgaagggcaaacggcgattaagatggcggagcgcggtcatcaggtgacattatgcgatctgtctggcgaaatgatcgcccgcgcgcagcaggcggccgaggcaaaaggtgtgagcaaagacatgcattttatacaatgcccggctcagaatgtcgcttcgcatttggaaagcccggttgatctgatattgtttcatgctgtgctggagtgggtggccgatcctgtcggcgtattagaaacgctctggtcagtattgcgtcctggcggcgcattgtcgttgatgttctataacgctaatggtttgctgatgcacaatatggtggcgggtaattttgactacgtgcaggcggggatgcctaaacgcaagaagcgtacactgtcgcctgactatccgcgcgatcccgctcaggtgtaccagtggctggaggcgattggttggcagattaccggtaaaaccggcgtccgtgtgtttcatgattatctgcgtgaaaagcgccaacagcgtgactgttatgagacattggtcgaactggaaacgcgttattgccgccaggagccgtatattagccttgggcgttatattcatgtcaccgcgattaaaagcccggctctagccgcagatgcaaggataacctatgagtga

SEQ ID NO: 155732 - protein, 267 aa, Salmonella enterica subsp. arizonae serovar 62:z4,z23:--
MQDRNFDDIAEKFSRNIYGTTKGQLRQAILWQDLDRVLEEIGGRKLRVLDAGGGEGQTAIKMAERGHQVTLCDLSGEMIARAQQAAEAKGVSKDMHFIQCPAQNVASHLESPVDLILFHAVLEWVADPVGVLETLWSVLRPGGALSLMFYNANGLLMHNMVAGNFDYVQAGMPKRKKRTLSPDYPRDPAQVYQWLEAIGWQITGKTGVRVFHDYLREKRQQRDCYETLVELETRYCRQEPYISLGRYIHVTAIKSPALAADARITYE

SEQ ID NO: 155733 - DNA, 804 bp, Salmonella enterica subsp. enterica serovar Paratyphi B str. SPB7
  CDS (1)..(804): transl_table=11
atgcaggatcgcaattttgatgacattgctgaaaagttttcccgtaacatttacggcacgaccaaaggacaactgcggcaagccattctgtggcaagacctggatcgcgtgctggaggagattggcgggcgaaaactgcgggtactggatgccggcggcggcgaagggcaaacggcgattaagatggcggaacgcggtcatcaggtgacgttatgcgatctgtctggcgaaatgatcgcccgcgcgcggcaggcggccgaggcaaaaggtgtgagcaaagacatgcattttatacaatgcccggctcaggacgtcgcttcgcatttggaaagcccggttgatctgatattgtttcatgctgtgctggagtgggtagccgatcctgtcggcgtattagaaacgctctggtcagtattgcgccctggcggcgtgctgtcgttgatgttctataacgctaacggtttgctgatgcacaatatggtggcgggtaattttgactacgtgcaggcggggatgcctaaacgcaagaagcgcacgctgtcgcctgactacccgcgcgaccccgcgcaggtgtaccagtggctggaggcgattggctggcagattaccggtaaaaccggcgtgcgtgtgtttcatgattatctgcgtgaaaaacaccagcagcgtgactgttatgagaccctggtcgaactggaaacgcgttattgccgccaggagccgtatattagccttgggcgctacattcatgtcaccgcgattaaaagcccggcgctagccgcagatgcaaggataacctatgagtga

SEQ ID NO: 155734 - protein, 267 aa, Salmonella enterica subsp. enterica serovar Paratyphi B str. SPB7
MQDRNFDDIAEKFSRNIYGTTKGQLRQAILWQDLDRVLEEIGGRKLRVLDAGGGEGQTAIKMAERGHQVTLCDLSGEMIARARQAAEAKGVSKDMHFIQCPAQDVASHLESPVDLILFHAVLEWVADPVGVLETLWSVLRPGGVLSLMFYNANGLLMHNMVAGNFDYVQAGMPKRKKRTLSPDYPRDPAQVYQWLEAIGWQITGKTGVRVFHDYLREKHQQRDCYETLVELETRYCRQEPYISLGRYIHVTAIKSPALAADARITYE

SEQ ID NO: 155735 - DNA, 786 bp, Yersinia pestis Angola
  CDS (1)..(786): transl_table=11
atgcaggatcgcaatttcgatgatattgctgaaaaattttcccgcaatatctacggtacgacgaagggaatgattcgtcaggcggtggtgtggcaagatatcactgagttgttgacgcagttaccaccgcgtccgctacggattctagatgcgggcggcggtgagggtcatatggcatgccaactggcggccttaggccatcaggtgctgttgtgcgacttatctgctgaaatggtccagcgcgcaaaagcggcagctcacgaaaaaggtgtgagccacaacatgcaatttatacaaagtgcagcgcaggacattcgtcaacatttagaacaacccgttgatctgatattgttccatgcggtattagaatggattgctgaacctcagcaggttctgcaaatactttttgatacgctaaaaccgggaggcgcactgtcgttgatgtttttcaatgccaacggattggtgatgcgtaatgcggtattgggcaactttcagttagccattcccggcgttaaacggcgtcggcaacgttcgttgtcaccgcaataccctttagacccaccaacggtatacggttggcttaagcaaatggggttatccattaggggtaaaacaggagtacgggtatttcacgattacatgaaaaataaacagcaacaaattgatgagtttgctgaattattagcgttggaacagcgctattgccggcaagagccctttattagtttggggcgctacgtgcatgttatggcgtttaagccgaatctgaaggacccattatga

SEQ ID NO: 155736 - protein, 261 aa, Yersinia pestis Angola
MQDRNFDDIAEKFSRNIYGTTKGMIRQAVVWQDITELLTQLPPRPLRILDAGGGEGHMACQLAALGHQVLLCDLSAEMVQRAKAAAHEKGVSHNMQFIQSAAQDIRQHLEQPVDLILFHAVLEWIAEPQQVLQILFDTLKPGGALSLMFFNANGLVMRNAVLGNFQLAIPGVKRRRQRSLSPQYPLDPPTVYGWLKQMGLSIRGKTGVRVFHDYMKNKQQQIDEFAELLALEQRYCRQEPFISLGRYVHVMAFKPNLKDPL

SEQ ID NO: 155737 - DNA, 750 bp, Pseudomonas putida GB-1
  CDS (1)..(750): transl_table=11
atgaacgaccgtcacttcgatgagctggccacgcgctttgccgagaagatctacggcggcgccaaaggtgcgatccgcctggccgtgctgcaggctgacctggccgaggcgctgcccgaccgcccgctacgtatcctcgacattggcgccgggttgggccacatggccttgtggctggccgagcgcggccatcagctgaccttggccgagcccgcagcccccatgctcgacggcgcccgtgcgcgctttgccgaagcgggccaaccggccaccttcattcatgcgccctggcaagaactgcttggccaactgaccgagccctacgacctggtgctctgccacgccgtgctcgaatggctggccgaacccgagagcatcctgcctgtgctgcaccagctcaccgcccccgacggctggttatcgctggccttctacaaccgcgatgcactggtctatcgcaacctgctcaagggccatttccgcaagttgcgcagcaaccgtctggaaggtgaaaagcagagcctgaccccacagaaaccgcttgatccacgcgaactcaaggcgcaacttgaacctatgtggcaggttgaaagcgaaagcggcgtgcgggtgttccacgactacatgcccaaggagttccagggtaaggccgagctgctcgacctgctggaaatggagctggcctaccgccgccaccccggtttcgctggccttggccgttacctgcactgggtctgccgccctcgctaa

SEQ ID NO: 155738 - protein, 249 aa, Pseudomonas putida GB-1
MNDRHFDELATRFAEKIYGGAKGAIRLAVLQADLAEALPDRPLRILDIGAGLGHMALWLAERGHQLTLAEPAAPMLDGARARFAEAGQPATFIHAPWQELLGQLTEPYDLVLCHAVLEWLAEPESILPVLHQLTAPDGWLSLAFYNRDALVYRNLLKGHFRKLRSNRLEGEKQSLTPQKPLDPRELKAQLEPMWQVESESGVRVFHDYMPKEFQGKAELLDLLEMELAYRRHPGFAGLGRYLHWVCRPR

SEQ ID NO: 155739 - DNA, 864 bp, Shewanella halifaxensis HAW-EB4
  CDS (1)..(864): transl_table=11
atggcttgctgtgagagaattcgcgcccgcgtaatttcgccaacagataacgttcaacgtatgaagacgacagtgaaacaagatagaaactttgatggtttagcccataagtttgccgccagcatttacggcactgcaaaaggcgaaataaggcaaacggttgtttggcaagatattgaacagatcttgttggcgctatcgaaacaacctagcaatgcggccgcagagcttagcgtacttgacgcaggcggcggcctagcccagctgtcacaaaaaattgctgcacttgggcataatgtcagcctgtgcgatctatcaagtgagatgttatctctagctaaacaagatattagtgataatcagctgctaaagaagtatcagtttatccatagcccagtacagaacattgccgaacacctgcaagtacctgttgatttaattctgtttcatgctgtgatggagtggctagcagaaccgattcaagccttgtctacactgtgcgagcaagtcaaacctggcggcattatttcagtgatgttttacaactataatggcctactctttaagaatttaatctgtggcaaccttaaccatattgaaaaaggcatgccccaccgcaaacgttttaagttacaacctcaacaaggaataaagcctgagttggtatattcatgcctagagcaagcaggttttaatattttgggaaaaaccggcgttagaacctttcatgactatatgcaaaatcatgatatgggagactttagttttgagcagattgtcgcgatggagcaaaagctatgtcgccaagagccttttctatcgttaggccgttatattcatgtttatgcgcaaaaatcagcataa

SEQ ID NO: 155740 - protein, 287 aa, Shewanella halifaxensis HAW-EB4
MACCERIRARVISPTDNVQRMKTTVKQDRNFDGLAHKFAASIYGTAKGEIRQTVVWQDIEQILLALSKQPSNAAAELSVLDAGGGLAQLSQKIAALGHNVSLCDLSSEMLSLAKQDISDNQLLKKYQFIHSPVQNIAEHLQVPVDLILFHAVMEWLAEPIQALSTLCEQVKPGGIISVMFYNYNGLLFKNLICGNLNHIEKGMPHRKRFKLQPQQGIKPELVYSCLEQAGFNILGKTGVRTFHDYMQNHDMGDFSFEQIVAMEQKLCRQEPFLSLGRYIHVYAQKSA

SEQ ID NO: 155741 - DNA, 750 bp, Pseudomonas putida W619
  CDS (1)..(750): transl_table=11
atgaacgaccgtcacttcgatgagctggccactcgcttcgccgagaagatctatggcggcgccaaaggcgcgatccgcctggccgtactgcaggccgacctggccgacgccctccccgaccgcccactgcgggtactcgacatcggagccgggctcggccacatggctttatggctggccgagcgcggtcaccaactgaccctggccgaaccggccgcacccatgctcgaaggtgcccgcacgcgctttgccgatgccggccagaccgccacgttcatccaggcgccatggcaggacctgctaggtcagctcaccgagccctacgatctggtgctgtgccacgccgtgctcgaatggctggccgagccagagagcatcctgccggtgctgcaccaactgaccgcacctggcgggtggttgtccctggccttctacaaccgggatgcgctggtttatcgcaacctgctcaagggccatttccgcaagttgcgcagcaaccgcctggaaggtgaaaaacagagcctcaccccgcagaaaccgcttgatccgcgtgagctcaaggtgcaacttgatcctctgtggcaggtcgaaaccgagagtggcgtgcgagttttccacgactacatgcccagggaattccaggccaaggccgagatgctcgacctgctggaaatggaactggcccaccgccgccacccgagctttgccgggcttggccgctacctgcactggatgtgccgccctcgctga

SEQ ID NO: 155742 - protein, 249 aa, Pseudomonas putida W619
MNDRHFDELATRFAEKIYGGAKGAIRLAVLQADLADALPDRPLRVLDIGAGLGHMALWLAERGHQLTLAEPAAPMLEGARTRFADAGQTATFIQAPWQDLLGQLTEPYDLVLCHAVLEWLAEPESILPVLHQLTAPGGWLSLAFYNRDALVYRNLLKGHFRKLRSNRLEGEKQSLTPQKPLDPRELKVQLDPLWQVETESGVRVFHDYMPREFQAKAEMLDLLEMELAHRRHPSFAGLGRYLHWMCRPR

SEQ ID NO: 155743 - DNA, 765 bp, Shewanella woodyi ATCC 51908
  CDS (1)..(765): transl_table=11
atgcaagacaagaacttcgatacactcgcgcataaatttgccaaaaatatctatggaacacccaaaggtgatattcgagccgcagttgtttggcgagatctgcaactggctctcgctgagctgggggacaggcctttaagagtattagatgctggtggcggctttggctttttcagtcaaaagctagcggcgcttggtcatgaagttatcttgtgtgatatctctgcagagatgttgtctctggcacaagcccagatagattctgctgagagtgacttgaatattcgcttagttcatagccctattcaggcgttaacgctagctgagtatggtcaatttgatctgattttatgtcatgcggtggctgagtggttgaccgatgctagaacgacattaagtcaattaactgagttacttaagcctggcggtttattctctttgatgttttataacaaagaggcgatgcgttttcatagtttagtatcgggtaattttgattatgtggccgcggagtttaaaattaagaaaaaagtggggctgacgccaacccacccactgtttattgatgatgtaagaggttggtttgatgactggaacatggagttagtatctcagtctggggtgagagttatccatgattaccttaaacattgtcagccacaaggtttcgattacgctaagctattggagatggagcttacctattctcagcgagagccctatatctctttaggtcgttatgtgcactttatcggtagaggataa

SEQ ID NO: 155744 - protein, 254 aa, Shewanella woodyi ATCC 51908
MQDKNFDTLAHKFAKNIYGTPKGDIRAAVVWRDLQLALAELGDRPLRVLDAGGGFGFFSQKLAALGHEVILCDISAEMLSLAQAQIDSAESDLNIRLVHSPIQALTLAEYGQFDLILCHAVAEWLTDARTTLSQLTELLKPGGLFSLMFYNKEAMRFHSLVSGNFDYVAAEFKIKKKVGLTPTHPLFIDDVRGWFDDWNMELVSQSGVRVIHDYLKHCQPQGFDYAKLLEMELTYSQREPYISLGRYVHFIGRG

SEQ ID NO: 155745 - DNA, 789 bp, Erwinia tasmaniensis Et1/99
  CDS (1)..(789): transl_table=11
atgcaggatcgcaattttgatgatatcgccgaaaaattctcgcagaacatttacggcaccacgaaaggacgcattcgccaggcgatcctctggcaggatctggatgcgctgttaagcacgtatccagccgggcagctatcggtgctggatgccggaggtggcgaggggcaaaccgggtgcggtattgcagcgcgtgggcaccaggtgcttttgtgcgatgtttcacaagaaatgttggcgcgcgctcagcgtcttgctcaacagaagggcgtgagtgataacatgcagttcaaacagattggcgctcagcagattaaccagcatttggctgagccggtcgatctggtattgtttcatgcggtgctggaatggatagcggaaccgcagcaggcattaaccgaattatatcaggcgcttaagccaggcggcgtcctgtcgctaatgttttacaacctgaacggcctgctgatgcaaacgatggtactgggcaacttcggctatttgcaggcggggctgaataaacgcaaaaagaaaacgctatctcccgactacccacgcgatccgcagcaggtttatgcctggctggaagcatgcggattcgtcattgaacataaaaccggcattcgggttttccatgactatctgcgtgataaaagcaaacaaagcgatcggtttgatgaggtgctggccctggagaagcagtattgccgccaggagccatttttaagtttagggcgttacatccacgttaccgcgcggaaacccataaggcagacgaactatgagtga

SEQ ID NO: 155746 - protein, 262 aa, Erwinia tasmaniensis Et1/99
MQDRNFDDIAEKFSQNIYGTTKGRIRQAILWQDLDALLSTYPAGQLSVLDAGGGEGQTGCGIAARGHQVLLCDVSQEMLARAQRLAQQKGVSDNMQFKQIGAQQINQHLAEPVDLVLFHAVLEWIAEPQQALTELYQALKPGGVLSLMFYNLNGLLMQTMVLGNFGYLQAGLNKRKKKTLSPDYPRDPQQVYAWLEACGFVIEHKTGIRVFHDYLRDKSKQSDRFDEVLALEKQYCRQEPFLSLGRYIHVTARKPIRQTNYE

SEQ ID NO: 155747 - DNA, 846 bp, Cellvibrio japonicus Ueda107
  CDS (1)..(846): transl_table=11
gtggccaagcaacccgataaccaggatcgcaattttgatgacctggccaagcgtttcaggaaaaatatctatggcggattaaaaggtgatgttcgcctcgccgtactggagcgcgattgtctggcatgtttgccaatagcaccgtttcaacagccagggaatcgctggcgtattctggatgccgggggtgggcaggggcaattttccctgcaattggccgcggcaggccatgaggttgtgctgtgtgatatctcggctgagatgctcaaacttgccgaagcacacataacccattgccaattgcaggatagggtcaccctggttcatgccgccattcaggatttgcccagggttattgacgatcaccgttttgactttgtgatctgtcatgcggtgatggagtggatgcaagacccgcagagcctgctaccttgcctgctcaattaccttaaacctgaggggtatctatccctgacgttctacaacttgcactcgctgatttataaaaacctgttgcgcaccaatttcaagaaaatacgcagtcgggattatgccgggcaaaaaggtagcctgacacctattaatccattaatgccagagcaagtgctgcaatgggttggcgaattaccgctgcaactgctcagccacagcggtatccgtgtatttcacgattatattttcgatgaggaaaaacgcgagcgcgacccggcaggtttagtagaaatggaattgttattttcacagcaggaaccttatcgctctctggggcgctatcagcatctgctgttacagcataaacacctggaaacctctgaaaaattacctgcgttgccatcgcggcgttaa

SEQ ID NO: 155748 - protein, 281 aa, Cellvibrio japonicus Ueda107
MAKQPDNQDRNFDDLAKRFRKNIYGGLKGDVRLAVLERDCLACLPIAPFQQPGNRWRILDAGGGQGQFSLQLAAAGHEVVLCDISAEMLKLAEAHITHCQLQDRVTLVHAAIQDLPRVIDDHRFDFVICHAVMEWMQDPQSLLPCLLNYLKPEGYLSLTFYNLHSLIYKNLLRTNFKKIRSRDYAGQKGSLTPINPLMPEQVLQWVGELPLQLLSHSGIRVFHDYIFDEEKRERDPAGLVEMELLFSQQEPYRSLGRYQHLLLQHKHLETSEKLPALPSRR

SEQ ID NO: 155749 - DNA, 804 bp, Salmonella enterica subsp. enterica serovar Newport str. SL254
  CDS (1)..(804): transl_table=11
atgcaggatcgcaattttgatgacattgctgaaaagttttcccgtaacatttacggcacgaccaaaggacaactgcggcaagccattctgtggcaagacctggatcgcgtgctggaggagattggcgggcggaaactgcgggtgctggatgccggcggcggcgaagggcaaacggcgattaagatggcggaacgcggccatcaggtgacgttatgcgatctgtctggcgaaatgatcgcccgcgcgcggcaggcggccgaggcaaaaggtgtgagcaaagacatgcattttatacaatgcccggctcaggacgtcgcttcgcatttggaaagcccggttgatctgatattgtttcatgctgtgctggagtgggtagccgatcctgtcggcgtattagaaacgctctggtcagtattgcgccctggcggcgcgctgtcgttgatgttctataacgctaacggtttgctgatgcacaatatggtggcgggtaattttgactacgtgcaggcggggatgcctaaacgcaagaagcgcacgctgtcgcctgactacccgcgccaccccgcgcaggtttaccagtggctggaggcgattggctggcagattaccggtaaaaccggcgtgcgtgtgtttcatgattatctgcgtgaaaaacaccagcagcgtgactgttatgagaccctggtcgaactggaaacgcgttattgccgccaggagccgtatattagccttgggcgctacattcatgtcaccgcgattaaaagcccggcgctagccgcagatgcaaggataacctatgagtga

SEQ ID NO: 155750 - protein, 267 aa, Salmonella enterica subsp. enterica serovar Newport str. SL254
MQDRNFDDIAEKFSRNIYGTTKGQLRQAILWQDLDRVLEEIGGRKLRVLDAGGGEGQTAIKMAERGHQVTLCDLSGEMIARARQAAEAKGVSKDMHFIQCPAQDVASHLESPVDLILFHAVLEWVADPVGVLETLWSVLRPGGALSLMFYNANGLLMHNMVAGNFDYVQAGMPKRKKRTLSPDYPRHPAQVYQWLEAIGWQITGKTGVRVFHDYLREKHQQRDCYETLVELETRYCRQEPYISLGRYIHVTAIKSPALAADARITYE

SEQ ID NO: 155751 - DNA, 783 bp, Vibrio cholerae V51
  CDS (1)..(783): transl_table=11
atgacagaagatcgcaatttcgacgatattgcccacaaatttgcaaaaaatatatacggttctgacaaaggtgagatccgccaagtcattgtttgggaagatttggagcagcttctcagtcaactggacacgcaaaaagttcccttgcacgtgctcgatgcgggtggcggcttggcgcaagtatcgcaaaaaatcgctcgccttgggcatcgagtgacactctgtgatctttcttcggaaatgttgcaattggccgagcaggatattgcaaacaatggcctgcttgagcagtatcgcttcgtccattcaccagtgcagacgattcaagcacaccttgatgcgcccgttgatttggtgctgtttcatgcggtgatggagtggttggcggagcccaaaccagcgttgcaaaatttgttggcacaagttagagcgggcggcatggtgtcggtgatgttttacaactaccacggtttggtttacaaaaacgccgtgtgtggcaacattccgcacgtgctagaagatatgccgcaccgcaaacggtttaaattacaaccgcagaaaggcttgctccccgaagaggtctaccaatggatcgaagaatcgggttttgagatctgcgggaaatccggtattcgttgtttcagtgattacatcggaaacatgaaaaacatgggcgaataccagcatgaggatttggtggcactggagcgcaaattctgccgtcaggagccttacctctcattgggccgatacattcacgtatgggctaagaaaaaacaataa

SEQ ID NO: 155752 - protein, 260 aa, Vibrio cholerae V51
MTEDRNFDDIAHKFAKNIYGSDKGEIRQVIVWEDLEQLLSQLDTQKVPLHVLDAGGGLAQVSQKIARLGHRVTLCDLSSEMLQLAEQDIANNGLLEQYRFVHSPVQTIQAHLDAPVDLVLFHAVMEWLAEPKPALQNLLAQVRAGGMVSVMFYNYHGLVYKNAVCGNIPHVLEDMPHRKRFKLQPQKGLLPEEVYQWIEESGFEICGKSGIRCFSDYIGNMKNMGEYQHEDLVALERKFCRQEPYLSLGRYIHVWAKKKQ

SEQ ID NO: 155753 - DNA, 837 bp, Vibrio sp. Ex25
  CDS (1)..(837): transl_table=11
ttgtgccagaatagcggcacaatccgttatgataactcagcagaagtgacagaagaccgcaatttcgacgatatcgcccacaaatttgcaaaaaatatttacggctccgataaaggggagatccgccaaatcattgtgtgggaagattttctacagattctaagtgaattagatgctgaccagcaacccctagaggtgttggatgctggtggtggtttggcacaaatgtcgcaaaagcttgctaagctcggacatcgaatcgctttatgtgatctatcttcggaaatgctgcagttggctaagcaggatattgaaaaaaacggtttgcttgagcagtatcgcctgattcattcgcctgtccaatccattggtgagcatatggatgaacaggtggatcttgttatgtttcacgccgtcatggagtggttggtcgatcctaaggccgcacttgaaacggtactagaacaagtaaaaccgggaggcatcgcatcagtgatgttctataaccaccatggtttagtctataaaaacgtggtttgtggcaacattcctcatatattagacggcatgcctcaccgaaaaagatttaaactacagccgcaaaaaggcttaaaacctgaagaagtctaccaatggatagaagattcaggctttagtatttgtggcaaatctggtatccgctcatttagtgattacataggcaatatgcaatacatgggcgattacgagtttgaagatgtgttggcgctagaaaaacaactttgtcgacaagagccatacctctcattaggccgctacattcatgtgtgggctaaaaagaacgataaacaggaataa

SEQ ID NO: 155754 - protein, 278 aa, Vibrio sp. Ex25
MCQNSGTIRYDNSAEVTEDRNFDDIAHKFAKNIYGSDKGEIRQIIVWEDFLQILSELDADQQPLEVLDAGGGLAQMSQKLAKLGHRIALCDLSSEMLQLAKQDIEKNGLLEQYRLIHSPVQSIGEHMDEQVDLVMFHAVMEWLVDPKAALETVLEQVKPGGIASVMFYNHHGLVYKNVVCGNIPHILDGMPHRKRFKLQPQKGLKPEEVYQWIEDSGFSICGKSGIRSFSDYIGNMQYMGDYEFEDVLALEKQLCRQEPYLSLGRYIHVWAKKNDKQE

SEQ ID NO: 155755 - DNA, 750 bp, Pseudomonas aeruginosa 2192
  CDS (1)..(750): transl_table=11
atgagcgaccgccatttcgacgaactggcgacgcgcttcgccgaaaagatctatggcggcgccaagggtgcgatccgcctcgcggtactccaggccgacctcgccgaggccctcccggagcgacctctgcgggtcctcgacatcggcgccgggctcggccacatgtcgctctggctggccgctcgcggccaccgcgtaaccctcgccgagccagcgcaacccatgctcgacggcgcccgccagcgcttcgccgaagccgggcaggccgccgaattcatccaggcgccctggcaggaactgctcggccagctcaccgagccctacgacctggtgctctgccacgccgtgctcgagtggctggccgaaccccatgcgatcccgccggtgctgcaccaactctgcgcacccggcggctggctgtcgctggccttctacaatcgcgacgcgctgatctaccgcaacctgctcaagggccacttccgcaagctgcgcaaggaacgcttcgctggcgaggggcagagcctgaccccgcagcgcccgctcgacccgcgcgagctggaacaggcgctggcagcgcgttggcgcatcgaggcgcgcagcggcgtgcgggtgttccacgactacatgccgagcgagttccaggccaaggccgaacggctcgacctggtagaaatggaactggcctaccgccgccacccggcctttgccgggcttggccgctacctgcactggctgtgccgcccgcaatga

SEQ ID NO: 155756 - protein, 249 aa, Pseudomonas aeruginosa 2192
MSDRHFDELATRFAEKIYGGAKGAIRLAVLQADLAEALPERPLRVLDIGAGLGHMSLWLAARGHRVTLAEPAQPMLDGARQRFAEAGQAAEFIQAPWQELLGQLTEPYDLVLCHAVLEWLAEPHAIPPVLHQLCAPGGWLSLAFYNRDALIYRNLLKGHFRKLRKERFAGEGQSLTPQRPLDPRELEQALAARWRIEARSGVRVFHDYMPSEFQAKAERLDLVEMELAYRRHPAFAGLGRYLHWLCRPQ

SEQ ID NO: 155757 - DNA, 744 bp, Alteromonas macleodii 'Deep ecotype'
  CDS (1)..(744): transl_table=11
atgaagaacgaccatatatttgatggcatcgcagaaaagttcgcaaacaacatttatggtacaacgaagggcaggcttaggcatactttgttgtgtgatgtacttgcgccatatttagcccggccgttaaaagccattgaaattggtggaggaacgggcgtgatgactgcgcatattgctgcaatgggtcatgacgttgtccttaccgatgcatcaagtgatgttctttcgaaagcagcgcctttgctcaacgccagcgataatatacgaattcgacatcagtacctgcaggaaatagatgatttagcagcctatgatttagtggtttgccatgcggtattagagtggttagatgcccccttcgatgctatcgactttattcataagaatatgaaacgtggcgcacgccttagcctgagtttttttaatcaagacgcaaacctatttgcaaatgcgatttacggtaatttcgattacattgctaagggcatgaaagcgaaaaagcaggtgaggctaaacccaaaacaaccgcttggtgcaatgcgagttgtagactattgtgaatctttggggtttaaggtgttagacaaagcagggatccgctgttttcacgactatatgcgggatatcagtcatcaaaatagtaagtttgatgaattattagcgcttgaacggcaataccataaaatgccaccctacctgtggttaggtaaatacttccaccttattttagaaaaaggttaa

SEQ ID NO: 155758 - protein, 247 aa, Alteromonas macleodii 'Deep ecotype'
MKNDHIFDGIAEKFANNIYGTTKGRLRHTLLCDVLAPYLARPLKAIEIGGGTGVMTAHIAAMGHDVVLTDASSDVLSKAAPLLNASDNIRIRHQYLQEIDDLAAYDLVVCHAVLEWLDAPFDAIDFIHKNMKRGARLSLSFFNQDANLFANAIYGNFDYIAKGMKAKKQVRLNPKQPLGAMRVVDYCESLGFKVLDKAGIRCFHDYMRDISHQNSKFDELLALERQYHKMPPYLWLGKYFHLILEKG

SEQ ID NO: 155759 - DNA, 804 bp, Salmonella enterica subsp. enterica serovar Agona str. SL483
  CDS (1)..(804): transl_table=11
atgcaggatcgcaattttgatgacattgctgaaaagttttcccgtaacatttacggcacgaccaaaggacagctgcggcaagccattctgtggcaagacctggagcgcgtgctggaggagattggcgggcgaaaactgcgggtactggatgccggcggcggcgaagggcaaacggcgattaagatggcggaacgcggccatcaggtgacgttatgcgatctgtctggcgaaatgatcgcccgcgcgcggcaggcggccgaggcaaaaggtgtgagcaaagacatgcattttatacaatgcccggctcaggacgtcgcttcgcatttggaaagcccggttgatctgatattgtttcatgctgtgctggagtgggtagccgatcctgtcggcgtattagaaacgctctggtcagtattgcgccctggcggcgcgctgtcgttgatgttctataacgctaacggtttgctgatgcacaatatggtggcgggtaattttgactacgtgcaggcggggatgcctaaacgcaagaagcgcacgctgtcgcctgactacccgcgcgaccccgcgcaggtgtaccagtggctggaggcgattggctggcagattaccggtaaaaccggcgtgcgtgtgtttcatgattatctgcgtgaaaaacaccagcagcgtgactgttatgagaccctggtcgaactggaaacgcgttattgccgccaggagccgtatattagccttgggcgctacattcatgtcaccgcgattaaaagcccggcgctagccgcagatgcaaggataacctatgagtga

SEQ ID NO: 155760 - protein, 267 aa, Salmonella enterica subsp. enterica serovar Agona str. SL483
MQDRNFDDIAEKFSRNIYGTTKGQLRQAILWQDLERVLEEIGGRKLRVLDAGGGEGQTAIKMAERGHQVTLCDLSGEMIARARQAAEAKGVSKDMHFIQCPAQDVASHLESPVDLILFHAVLEWVADPVGVLETLWSVLRPGGALSLMFYNANGLLMHNMVAGNFDYVQAGMPKRKKRTLSPDYPRDPAQVYQWLEAIGWQITGKTGVRVFHDYLREKHQQRDCYETLVELETRYCRQEPYISLGRYIHVTAIKSPALAADARITYE

SEQ ID NO: 155761 - DNA, 783 bp, Proteus mirabilis HI4320
  CDS (10)..(783): transl_table=11
ggcgttttaatgtcagaccgtaattttgacgatattgctgataaattctctcgcaatatctatggcacaacaaaaggaaaaatccgccaagcggtgatttgggatgatttacaacaattattaactcaactccctgatcgtccgttgcgtattttagatgcggggggtggtgaaggttatttttccagacaactggcaaaattagggcaccagataattttatgtgatctatcacaagagatgcttaaccgcgcacaagaagcggctattgatgaaggtgttgtcaatcaaatgacgtttatttgttgtgcagcacaagagataaaccagcatctagatgatggtgttgacttaattctattccatgccgtattagagtggatcacagatcagaaaaacgccataaatgtacttaccgatatgctacttcctaatggtatcctatcgttaatgttttacaatgcgaatggtattgtcatgagaaatgctattttgggaaatttccatttggcaaatccggaaataccacgcagaagaaaacgctcattatccccacaaaatccgctacaacctgaggatgtttatcaatggttagcgtcattttcaatgacgattttaggaaaaacgggagtgcgtgtttttcatgactatttgcaaagtcgtcagttgcaaaataaagattttccagcgttgcttgccttagagcaacgctattgtcggcaagagccctatatcagtctggggcgttacattcatgtcatggcacaaaagtgtgtaaattaa

SEQ ID NO: 155762 - protein, 257 aa, Proteus mirabilis HI4320
MSDRNFDDIADKFSRNIYGTTKGKIRQAVIWDDLQQLLTQLPDRPLRILDAGGGEGYFSRQLAKLGHQIILCDLSQEMLNRAQEAAIDEGVVNQMTFICCAAQEINQHLDDGVDLILFHAVLEWITDQKNAINVLTDMLLPNGILSLMFYNANGIVMRNAILGNFHLANPEIPRRRKRSLSPQNPLQPEDVYQWLASFSMTILGKTGVRVFHDYLQSRQLQNKDFPALLALEQRYCRQEPYISLGRYIHVMAQKCVN

SEQ ID NO: 155763 - DNA, 804 bp, Salmonella enterica subsp. enterica serovar Gallinarum str. 287/91
  CDS (1)..(804): transl_table=11
atgcaggatcgcaattttgatgacattgctgaaaagttttcccgtaacatttacggcacgaccaaaggacaactgcggcaagccattctgtggcaagacctggatcgcgtgctggaggagattggcgggcggaaactgcgggtgctggatgccggctgcggcgaagggcaaacggcgattaagatggcggaacgcggccatcaggtgacgttatgcgatctgtctggcgaaatgatcgcccgcgcgcggcaggcggccgaggcaaaaggtgtgagcaaagacatgcattttatacaatgcccggctcaggacgtcgcttcgcatttggaaagcccggttgatctgatattgtttcatgctgtgctggagtgggtagccgatcctgtcggcgtattagaaacgctctggtcagtattgcgccctggcggcgcgctgtcgttgatgttctataacgctaacggtttgctgatgcacaatatggtggcgggtaattttgactacgtgcaggcggggatgcctaaacgcaagaagcgcacgctgtcgcctgactacccgcgcgaccccgcgcaggtgtaccagtggctggaggcgattggttggcagattaccggtaaaaccggcgtgcgtgtgtttcatgattatctgcgtgaaaaacaccagcagcgtgactgttatgagaccctggtcgaactggaaacgcgttattgccgccaggagccgtatattagccttgggcgctacattcatgtcacagcgattaaaagcccggcgctagccgcagatgcaaggataacctatgagtga

SEQ ID NO: 155764 - protein, 267 aa, Salmonella enterica subsp. enterica serovar Gallinarum str. 287/91
MQDRNFDDIAEKFSRNIYGTTKGQLRQAILWQDLDRVLEEIGGRKLRVLDAGCGEGQTAIKMAERGHQVTLCDLSGEMIARARQAAEAKGVSKDMHFIQCPAQDVASHLESPVDLILFHAVLEWVADPVGVLETLWSVLRPGGALSLMFYNANGLLMHNMVAGNFDYVQAGMPKRKKRTLSPDYPRDPAQVYQWLEAIGWQITGKTGVRVFHDYLREKHQQRDCYETLVELETRYCRQEPYISLGRYIHVTAIKSPALAADARITYE

SEQ ID NO: 155765 - DNA, 801 bp, Klebsiella pneumoniae 342
  CDS (1)..(801): transl_table=11
atgcaggatcgcaatttcgatgacattgctgaaaagttttcgcgcaatatttacggcaccacaaaaggtcagctgcgccaggcgatcctctggcaggatctggaaccgctgctggcgcagctggggccgggaccgctgagggtgctggatgccggcggcggcgaagggcaaacagccattaaagtggcgcaactgggccatcaggtgacgctgtgcgatctctccgctgaaatggtggcgcgcgcccgccaggcggccgtcgataaaggtgtgatcgacaacatgcattttgtacaatgcgcggctcaggatattgcgcagcatttggaaagcccggttgatctggtactgtttcatgcggtgctggagtgggtggcggagccccaggaggtgctgcgtacgctgtggtcgacactgcgtcctggcggtgggctgtcgttgatgttctacaatgctaacggcctgctgatgcacaatatggtggccggtaatttcgattacgtacaattgggcatgccaaaaaagaaaaaacgcacgctgtcgccggattatccgcgtgagccgcagcaggtttatcactggctggaagagattggctggcagattgtcagcaaaaccggcgtgcgggtgtttcatgattatctgcgtgaaaaacgccaacagcatgacagctatgcggcgctgctggagctggaaacgcgctactgtcgtcaggagccgtatctcagcctgggccgttatattcatgtcaccgcgcttaagagccaggctcatagccgcagatgcaaggataaagtatga

SEQ ID NO: 155766 - protein, 266 aa, Klebsiella pneumoniae 342
MQDRNFDDIAEKFSRNIYGTTKGQLRQAILWQDLEPLLAQLGPGPLRVLDAGGGEGQTAIKVAQLGHQVTLCDLSAEMVARARQAAVDKGVIDNMHFVQCAAQDIAQHLESPVDLVLFHAVLEWVAEPQEVLRTLWSTLRPGGGLSLMFYNANGLLMHNMVAGNFDYVQLGMPKKKKRTLSPDYPREPQQVYHWLEEIGWQIVSKTGVRVFHDYLREKRQQHDSYAALLELETRYCRQEPYLSLGRYIHVTALKSQAHSRRCKDKV

SEQ ID NO: 155767 - DNA, 780 bp, Aliivibrio salmonicida LFI1238
  CDS (1)..(780): transl_table=11
gtgaataaagaccgtaatttcgatgatatcgcccataaatttgcaaagaacatttatggttctgacaaaggcgagatccgtcaaactattgtatggcaagatatggaaaccatcttagctgaaactaaagcaaattctaagccacttattgttttagatgctggtggaggaataggccaaatatcgcaattaatagcgaagcagggtcatacagtgactttgtgtgatatatcttcagaaatgctaacattagcgaaagaggcggtcgaagataatggtttatcgtctcagtatcaatttattcattcggcagtacaagaaattgaacagcataaagttggtaaggttgatattctacttttccatgcagtgatggaatggctagatgatccgaaaacagcattggatattttattgaaacaagttaaatctggtgggtatgcttctattatgttttataatcaccatggtttagtattgaaaaatgtgatttgtggcaatattcctcatgttttagatggcatgccacatcgaaaacggtttaagttacaaccacaaaaagggttgatgccacatgatgtttatcagtggattgaagattctgggtatgaaataaagggaaaatcgggtattcgctcttttcatgattacatcggtaacatggaatacatggggaattaccaaatcgaagacgtgctgaagctagaaaaacagttatgccgtcaagaaccttatctgtctcttggtcgttatattcacgtatgggcgaagagaaaataa

SEQ ID NO: 155768 - protein, 259 aa, Aliivibrio salmonicida LFI1238
MNKDRNFDDIAHKFAKNIYGSDKGEIRQTIVWQDMETILAETKANSKPLIVLDAGGGIGQISQLIAKQGHTVTLCDISSEMLTLAKEAVEDNGLSSQYQFIHSAVQEIEQHKVGKVDILLFHAVMEWLDDPKTALDILLKQVKSGGYASIMFYNHHGLVLKNVICGNIPHVLDGMPHRKRFKLQPQKGLMPHDVYQWIEDSGYEIKGKSGIRSFHDYIGNMEYMGNYQIEDVLKLEKQLCRQEPYLSLGRYIHVWAKRK

SEQ ID NO: 155769 - DNA, 798 bp, Escherichia coli O127:H6 str. E2348/69
  CDS (13)..(798): transl_table=11
gtggagaaagcaatgcaggatcgcaattttgatgatattgcggaaaagttttcccgtaacatttacggcaccaccaaagggcagcttcgacaggctattctgtggcaggatctcgatcgcgtgctggcggaaatgggcccgcaaaaactgcgtgtgctggatgctggcggcggagaagggcagaccgcaatcaaaatggccgagcgcgggcatcaggtcattttatgcgatctttctgcgcagatgatcgaccgcgcaaaacaggcggcagaagcaaaaggtgtgagcgacaacatgcaatttatacattgcgccgctcaggatgttgcttcgcatttggaaacgcccgttgatctgatattgttccatgcggtgctcgagtgggtggccgatccccgcagcgtattacagaccctgtggtcagtgttgcgtccaggcggcgtattgtcgttaatgttctacaatgcgcatggtttgttgatgcataacatggtcgccgggaattttgattacgtgcaggcgggaatgccgaaaaagaaaaaacggacgctttcgccagattatccacgcgacccggcgcaggtttatctgtggctggaagaagctggttggcaaattctgggtaagacaggcgttcgcgtgtttcatgattatctgcgcgagaagcaccagcagcgcgactgctatgaagcattacttgaattagaaacgcgttattgccgtcaggaaccgtatattaccttggggcgttatattcatgtcaccgcgcgcaaaccgcagagcaaggataaagtatga

SEQ ID NO: 155770 - protein, 261 aa, Escherichia coli O127:H6 str. E2348/69
MQDRNFDDIAEKFSRNIYGTTKGQLRQAILWQDLDRVLAEMGPQKLRVLDAGGGEGQTAIKMAERGHQVILCDLSAQMIDRAKQAAEAKGVSDNMQFIHCAAQDVASHLETPVDLILFHAVLEWVADPRSVLQTLWSVLRPGGVLSLMFYNAHGLLMHNMVAGNFDYVQAGMPKKKKRTLSPDYPRDPAQVYLWLEEAGWQILGKTGVRVFHDYLREKHQQRDCYEALLELETRYCRQEPYITLGRYIHVTARKPQSKDKV

SEQ ID NO: 155771 - DNA, 786 bp, Escherichia fergusonii ATCC 35469
  CDS (1)..(786): transl_table=11
atgcaggatcgcaattttgatgatattgcggaaaagttttcccgtaacatttacggcaccaccaaagggcagcttcgacaggctattctgtggcaggacctcgatcgcgtgctggcggaaatgggctcgcaaaaactgcgtgtgctggatgctggcggtggagaagggcagaccgcaatcaaaatggccgagcttgggcatcaggttattttatgcgatctttctgcgcagatgatcgaccgcgcaaaacaggcggcagaagcaaaaggtgtgagcgacaacatgcaatttatacattgcgccgctcaggatgttgcttcgcatttggaaacgcccgttgatctgatattgttccatgcggtgctcgagtgggtggccgatccccgcagcgtattgcagaccctgtggtcagtgttgcgtccaggcggtgtgttgtcgttaatgttctacaatgcgcacggcttgctgatgcataacatggtcgccgggaattttgattacgtgcaggcgggaatgccgaaaaagaaaaaacggacgctttcgccagattatccacgcgacccggcgcaggtttatctgtggctggaagaagctggttggcaaattatgggtaagacaggcgttcgcgtgtttcatgattatctgcgagagaagcaccagcagcgcgactgctatgaagcattacttgaattagaaacgcgttattgccgtcaggaaccgtatattaccctggggcgttatattcatgtcaccgcgcgcaaaccgcagagcaaggataaagtatga

SEQ ID NO: 155772 - protein, 261 aa, Escherichia fergusonii ATCC 35469
MQDRNFDDIAEKFSRNIYGTTKGQLRQAILWQDLDRVLAEMGSQKLRVLDAGGGEGQTAIKMAELGHQVILCDLSAQMIDRAKQAAEAKGVSDNMQFIHCAAQDVASHLETPVDLILFHAVLEWVADPRSVLQTLWSVLRPGGVLSLMFYNAHGLLMHNMVAGNFDYVQAGMPKKKKRTLSPDYPRDPAQVYLWLEEAGWQIMGKTGVRVFHDYLREKHQQRDCYEALLELETRYCRQEPYITLGRYIHVTARKPQSKDKV

SEQ ID NO: 155773 - DNA, 786 bp, Escherichia coli IAI1
  CDS (1)..(786): transl_table=11
atgcaggatcgcaattttgatgatattgcggaaaagttttcccgtaacatttacggcaccaccaaagggcagcttcgacaggctattctgtggcaggatctcgatcacgtgctggcggaaatgggcccgcaaaaactgcgtgtgctggatgctggcggtggtgaagggcagaccgcaatcaaaatggccgagcgtgggcatcaggtcattttatgcgatatttctgcgcagatgatcgaccgcgcaaaacaggcggcagaagcaaaaggtgtgagcgacaacatgcaatttatacattgcgccgctcaggatgttgcttcgcatttggaaacgcccgttgatctgatattgttccatgcggtgctcgagtgggtggccgatccccgcagtgtattgcagaccctgtggtcagtgttgcgtccaggcggcgtgttgtcgttaatgttctacaatgcgcatggtttgttgatgcataacatggtcgccgggaattttgattacgtgcaggcgggaatgccgaaaaagaaaaaacggacgctttcgccagattatccacgcgacccggcgcaggtttatctgtggctggaagaagctggttggcaaattatgggtaagacaggcgttcgcgtgtttcatgattatctgcgcgagaagcaccagcagcgcgactgctatgaagcattacttgaattagaaacgcgttattgccgtcaggaaccgtatattaccctggggcgttatattcatgtcaccgcgcgcaaaccgcagagcaaggataaagtatga

SEQ ID NO: 155774 - protein, 261 aa, Escherichia coli IAI1
MQDRNFDDIAEKFSRNIYGTTKGQLRQAILWQDLDHVLAEMGPQKLRVLDAGGGEGQTAIKMAERGHQVILCDISAQMIDRAKQAAEAKGVSDNMQFIHCAAQDVASHLETPVDLILFHAVLEWVADPRSVLQTLWSVLRPGGVLSLMFYNAHGLLMHNMVAGNFDYVQAGMPKKKKRTLSPDYPRDPAQVYLWLEEAGWQIMGKTGVRVFHDYLREKHQQRDCYEALLELETRYCRQEPYITLGRYIHVTARKPQSKDKV

SEQ ID NO: 155775 - DNA, 786 bp, Escherichia coli S88
  CDS (1)..(786): transl_table=11
atgcaggatcgcaattttgatgatattgcggaaaagttttcccgtaacatttacggcaccaccaaagggcagcttcgacaggctattctgtggcaggatctcgatcgcgtgctggcggaaatgggcccgcaaaaactgcgtgtgctggatgctggcggtggagaagggcagaccgcaatcaaaatggccgagcgcgggcatcaggtcattttatgcgatctttctgtgcagatgatcgaccgcgcaaaacaggcggcagaagcaaaaggtgtgagcgacaacatgcaatttatacattgcgccgctcaggatgttgcttcgcatttggaaacgcccgttgatctgatattgttccatgcggtgctcgagtgggtggccgatccccgcagcgtattacagaccctgtggtcagtgttgcgtccaggcggcgtgttgtcgttaatgttctacaatgcgcatggtttgttgatgcataacatggtcgccgggaattttgattacgtgcaggcgggaatgccgaaaaagaaaaaacggacgctttcgccagattatccacgcgacccggcgcaggtttatctgtggctggaagaagctggttggcaaattatgggtaagacaggcgttcgcgtgtttcatgattatctgcgcgagaagcaccagcagcgcgactgctatgaagcattacttgaattagaaacgcgttattgccgtcaggaaccgtatattaccctggggcgttatattcatgtcaccgcgcgcaaaccgcagagcaaggataaagtatga

SEQ ID NO: 155776 - protein, 261 aa, Escherichia coli S88
MQDRNFDDIAEKFSRNIYGTTKGQLRQAILWQDLDRVLAEMGPQKLRVLDAGGGEGQTAIKMAERGHQVILCDLSVQMIDRAKQAAEAKGVSDNMQFIHCAAQDVASHLETPVDLILFHAVLEWVADPRSVLQTLWSVLRPGGVLSLMFYNAHGLLMHNMVAGNFDYVQAGMPKKKKRTLSPDYPRDPAQVYLWLEEAGWQIMGKTGVRVFHDYLREKHQQRDCYEALLELETRYCRQEPYITLGRYIHVTARKPQSKDKV

SEQ ID NO: 155777 - DNA, 786 bp, Escherichia coli ED1a
  CDS (1)..(786): transl_table=11
atgcaggatcgcaattttgatgatattgcggaaaagttttcccgtaacatttacggcaccaccaaagggcagcttcgacaggctattctgtggcaggatctcgatcgcgtgctggcggaaatgggcccgcaaaaactgcgtgtgctggatgctggcggcggagaagggcagaccgcaatcaaaatggccgagcgcgggcatcaggtcattttatgcgatctttctgcgcagatgatcgaccgcgcaaaacaggcggcagaagcaaaaggtgtgagcgacaacatgcaatttatacattgcgccgctcaggatgttgcttcgcatttggaaacgcccgttgatctgatattgttccatgcggtgctcgagtgggtgaccgatccccgcagcgtattacagaccctgtggtcagttttgcgtccaggcggcgtgttgtcgttaatgttctacaatgcgcatggtttgttgatgcataacatggtcgccgggaattttgattacgtgcaggcgggaatgccgaaaaagaaaaaacggacgctttcgccagattatccacgcgacccggcgcaggtttatctgtggctggaagaagctggttggcaaattatgggtaagacaggcgttcgcgtgtttcatgattatctgcgcgagaagcaccagcagcgcgactgctatgaagcattacttgaattagaaacgcgttattgccgtcaggaaccgtatattaccctggggcgttatattcatgtcaccgcgcgcaaaccgcagagcaaggataaagtatga

SEQ ID NO: 155778 - protein, 261 aa, Escherichia coli ED1a
MQDRNFDDIAEKFSRNIYGTTKGQLRQAILWQDLDRVLAEMGPQKLRVLDAGGGEGQTAIKMAERGHQVILCDLSAQMIDRAKQAAEAKGVSDNMQFIHCAAQDVASHLETPVDLILFHAVLEWVTDPRSVLQTLWSVLRPGGVLSLMFYNAHGLLMHNMVAGNFDYVQAGMPKKKKRTLSPDYPRDPAQVYLWLEEAGWQIMGKTGVRVFHDYLREKHQQRDCYEALLELETRYCRQEPYITLGRYIHVTARKPQSKDKV

SEQ ID NO: 155779 - DNA, 786 bp, Vibrio splendidus LGP32
  CDS (1)..(786): transl_table=11
atgactgaagaccgtaatttcgacgatattgcccacaaatttgcaaaaaacatatacggctctgacaaaggagagatccgtcagtgcatcgtatgggaagatttagaacaagctttgagcaagtttgatcaacccgcttcgccgctgcatgtccttgatgcaggcggtggacttgcacagatgtcacaaaaaattgcgacactaggccacaacgtttctctgtgcgacctctcctctgaaatgttgaagctcgcagaagaaagtatcagcgaagcgggtttgctcgagcaatatcgatttattcattctccggtacaaaaagtggcagagcatctcgaagagaaagtcgattttgtgatgtttcatgccgtaatggaatggctagcagaccccaaacaggcacttgatttattgttgaaacaagtaaaacccggtggtattgcctcgataatgttttacaaccaccatggtttagtcctgaaaaatgtgatttgtggcaacattcctcatgtattgaatgggatgccacatcgaaaaaggtttaagctgcaaccacaaaaaggcttgaagcctgaagaggtttatcaatggatagaagacgctggtctagatatctgtggtaaatcaggcattcgctctttcagtgactacataggtaatatggagtacatgggtgattaccaatttgaagatgtgttggaactagagaaacagctatgtcgccaagagccatatctgtcgctaggccgttatattcacgtttgggctcaaaaacctgcgcaataa

SEQ ID NO: 155780 - protein, 261 aa, Vibrio splendidus LGP32
MTEDRNFDDIAHKFAKNIYGSDKGEIRQCIVWEDLEQALSKFDQPASPLHVLDAGGGLAQMSQKIATLGHNVSLCDLSSEMLKLAEESISEAGLLEQYRFIHSPVQKVAEHLEEKVDFVMFHAVMEWLADPKQALDLLLKQVKPGGIASIMFYNHHGLVLKNVICGNIPHVLNGMPHRKRFKLQPQKGLKPEEVYQWIEDAGLDICGKSGIRSFSDYIGNMEYMGDYQFEDVLELEKQLCRQEPYLSLGRYIHVWAQKPAQ

SEQ ID NO: 155781 - DNA, 750 bp, Pseudomonas aeruginosa LESB58
  CDS (1)..(750): transl_table=11
atgagcgaccgccatttcgacgaactggcgacgcgcttcgccgaaaagatctatggcggcgccaagggtgcgatccgcctcgcggtactccaggccgacctcgccgaggccctcccggagcgacctctgcgggtcctcgacatcggcgccgggctcggccacatgtcgctctggctggccgctcgcggccaccgcgtaaccctcgccgagccagcgcaacccatgctcgacggcgcccgccagcgcttcgccgaagccgggcaggccgccgaattcatccaggcgccctggcaggaactgctcggccagctcaccgagccctacgacctggtgctctgccacgccgtgctcgagtggctggccgaaccccatgcgatcctgccggtgctgcaccaactctgcgcacccggcggctggctgtcgctggccttctacaatcgcgacgcgctgatctaccgcaacctgctcaagggccacttccgcaagctgcgcaagcaacgcttcgctggcgaggggcagagcctgaccccgcagcgcccgctcgacccgcgcgagctggaacaggcgctggcagcgcgttggcgcatcgaggcgcgcagcggcgtgcgggtgttccacgactacatgccgagcgagttccaggccaaggccgaacggctcgacctggtagaaatggaactggcctaccgccgccacccggcctttgccgggcttggccgctacctgcactggctgtgccgcccgcaatga

SEQ ID NO: 155782 - protein, 249 aa, Pseudomonas aeruginosa LESB58
MSDRHFDELATRFAEKIYGGAKGAIRLAVLQADLAEALPERPLRVLDIGAGLGHMSLWLAARGHRVTLAEPAQPMLDGARQRFAEAGQAAEFIQAPWQELLGQLTEPYDLVLCHAVLEWLAEPHAILPVLHQLCAPGGWLSLAFYNRDALIYRNLLKGHFRKLRKQRFAGEGQSLTPQRPLDPRELEQALAARWRIEARSGVRVFHDYMPSEFQAKAERLDLVEMELAYRRHPAFAGLGRYLHWLCRPQ

SEQ ID NO: 155783 - DNA, 786 bp, Pectobacterium atrosepticum SCRI1043
  CDS (1)..(786): transl_table=11
atgcaggatcgcaattttaacgatatcgccgaaaaatttgctcagaatatctatggcacaacgaaggggagacttcggctggcggtattgtggcaggatcttagcgagcttttggccaagcttccggctcggcctttgcgcatccttgacgcgggaggcggtgaagggcagatggcctgtcgtctggcggctttaggacatcaggtattgttgtgcgatgtttccgatgagatgattcagcgcgccaaaaacgcggcagctgcgcagggtgtcagccataatatgcgttttgtgcagtgtgccgcacaggatatcgcgcaatatatggaaagccccgccgatctgatattgttccacgcggtgctggagtgggtcgcgcaaccgcagcaggcgctgaaaatattgtatgattgcctgtcgccgggtggtgcgctgtctttgatgttttataaccatcacgggctgttgatgcgtaacatggtgctgggcaactttgattatgttcaggccggcatgccgaagaataaacggcgttcgttatcgccagatcacccgctggatccgcaagaagtgtacggctggcttgatgatatggggctaactattagcggaaaaactggcgtgcgtgtgtttcatgactacttgcagaataagcagcagcagattgataaatttgccgatattctggagcttgagcagcggtattgccgacaagagccttttgtgagtttgggccgttatatccatgtcatggcgcataaaccccctttgaaggatgcattatga

SEQ ID NO: 155784 - protein, 261 aa, Pectobacterium atrosepticum SCRI1043
MQDRNFNDIAEKFAQNIYGTTKGRLRLAVLWQDLSELLAKLPARPLRILDAGGGEGQMACRLAALGHQVLLCDVSDEMIQRAKNAAAAQGVSHNMRFVQCAAQDIAQYMESPADLILFHAVLEWVAQPQQALKILYDCLSPGGALSLMFYNHHGLLMRNMVLGNFDYVQAGMPKNKRRSLSPDHPLDPQEVYGWLDDMGLTISGKTGVRVFHDYLQNKQQQIDKFADILELEQRYCRQEPFVSLGRYIHVMAHKPPLKDAL

SEQ ID NO: 155785 - DNA, 813 bp, Photobacterium profundum SS9
  CDS (1)..(813): transl_table=11
atgatcgaagatcgaaattttgatgatttagcgcaaaaatttgcgaaaaacatatatggcactgccaaagggcagatccgacaaacagttgtctggcaggatatagagcagattctatctgggttcgacggtgatattccgctgcgtgttttagacgctggtgggggtatcggacaattgtcacaaaaagttgcagagttaggtcactatgtcactttatgtgatctttctggtgaaatgctgacactcgccgagcaggaaattgctaaaaatggacttcttgagcaatatcgcttagttcatagtcctgttcagcatattggtgaccatcttgatgaacctgtcgatttggtgctttttcatgccgtgatggagtggctatcggatccaattgcggtacttgatcaattattggaacaagtcaaaccaggcggtgttatttcagtgatgttttacaactacaatgggttgctattcaaaaacctaatttgtggtaatttgacgcacatagaacaaggtatgcctcatcgtaagcgttttaagctgcaaccgcagcaaggcattaagcccgatgaggtgtatagttgcctgattaacgcgggattaactattttaggcaaaactggcgtacgcacttttcacgattacatgcaaaatgcgatggtgggtgattacagttttgaacaagttcttgagatggagcaaaagctttgtcgtcaggaaccttatttgtctttggggcgctatattcacgtttatgcacgtaaacccttgtgcgaagagatgcaagtgaacggcagtaactgtgaataa

SEQ ID NO: 155786 - protein, 270 aa, Photobacterium profundum SS9
MIEDRNFDDLAQKFAKNIYGTAKGQIRQTVVWQDIEQILSGFDGDIPLRVLDAGGGIGQLSQKVAELGHYVTLCDLSGEMLTLAEQEIAKNGLLEQYRLVHSPVQHIGDHLDEPVDLVLFHAVMEWLSDPIAVLDQLLEQVKPGGVISVMFYNYNGLLFKNLICGNLTHIEQGMPHRKRFKLQPQQGIKPDEVYSCLINAGLTILGKTGVRTFHDYMQNAMVGDYSFEQVLEMEQKLCRQEPYLSLGRYIHVYARKPLCEEMQVNGSNCE

SEQ ID NO: 155787 - DNA, 804 bp, Salmonella enterica
  subsp. enterica serovar Paratyphi A str. ATCC 9150
  CDS (1)..(804): transl_table=11
atgcaggatcgcaattttgatgacattgctgaaaagttttcccgtaacatttacggcacgaccaaaggacaactgcggcaagccattctgtggcaagacctggatcgcgtgctggaggagattggcgggcaaaaactgtgggtactggatgccggcggcggcgaagggcaaacggcgattaagatggcggaacgcggccatcaggtaacgttatgcgatctgtctggtgaaatgatcgcccgcgcgcggcaggcggccgaggcaaaaggtgtgagcaaagacatgcattttatacaatgcccggctcaggacgtcgcttcgcatttggaaagcccggttgatctgatattgtttcatgctgtgctggagtgggtagccgatcctgtcggcgtattagaaacgctctggtcagtattgcgccctggcggcgcgctgtcgttgatgttctataacgctaacggtttgctgatgcacaatatggtggcgggtaattttgactacgtgcaggcggggatgcctaaacgcaagaagcgcacgctgtcgcctgactacccgcgcgaccccgcgcaggtgtaccagtggctggaggcgattggctggcagattaccggtaaaaccggcgtgcgtgtgtttcatgattatctgcgtgaaaaacaccagcagcgtgactgttatgagaccctggtcgaactggaaacgcgttattgccgccaggagccgtatattagccttgggcgctacattcatgtcaccgcgattaaaagcccggcgctagccgcagatgcaaggataacctatgagtga

SEQ ID NO: 155788 - protein, 267 aa, Salmonella enterica
  subsp. enterica serovar Paratyphi A str. ATCC 9150
MQDRNFDDIAEKFSRNIYGTTKGQLRQAILWQDLDRVLEEIGGQKLWVLDAGGGEGQTAIKMAERGHQVTLCDLSGEMIARARQAAEAKGVSKDMHFIQCPAQDVASHLESPVDLILFHAVLEWVADPVGVLETLWSVLRPGGALSLMFYNANGLLMHNMVAGNFDYVQAGMPKRKKRTLSPDYPRDPAQVYQWLEAIGWQITGKTGVRVFHDYLREKHQQRDCYETLVELETRYCRQEPYISLGRYIHVTAIKSPALAADARITYE

SEQ ID NO: 155789 - DNA, 789 bp, Idiomarina loihiensis L2TR
  CDS (1)..(789): transl_table=11
atgaataaaaagaaacaagaacgcggcgactttagcggtatcagccaaaagttctctaaatccatttatgacaccactaaggggcaactcagggttgaggtgctcaagcgtgatttagcgccgctgttagccactgagccatgtttagtgcttgatgtaggagccgggcttggtcaggtaaaccagtggtttcaggaaaaaggctttacggtggtgcattctgacctttcaaccgaaatgattgaagaagctgagcgccgtcacaaagcggcaggactggggcataagtgcaagtacgttgcggcaagtttaacggagcttgttaatcagcaaccgctaagtcaatacgatattattctctgccacgccgtgctggaatggctgccggatactgagctcgccattcatcaactggcttcattattaaagcctggcggcaaactgtcacttatgttttataactaccacgccaagctttttgctaacgctatttacggcaactttgattatattgagcgcggcctgaaggtaaaaaagactgttcgtttgagtcctgagaatccagccgtaccggagcaggttggctgctggttagagcaagaagggttaaacgttcagcaaaagaccggtgttcgctgttttcatgactatttacgcgacctgactcatcagcaacggttcgatgagctactggcactggagatgaaatacaaccaaatgtccccttatcgtgagctgggacgttatcaacactggcttatagaaaaaccgaattgtcaggaggaatga

SEQ ID NO: 155790 - protein, 262 aa, Idiomarina loihiensis L2TR
MNKKKQERGDFSGISQKFSKSIYDTTKGQLRVEVLKRDLAPLLATEPCLVLDVGAGLGQVNQWFQEKGFTVVHSDLSTEMIEEAERRHKAAGLGHKCKYVAASLTELVNQQPLSQYDIILCHAVLEWLPDTELAIHQLASLLKPGGKLSLMFYNYHAKLFANAIYGNFDYIERGLKVKKTVRLSPENPAVPEQVGCWLEQEGLNVQQKTGVRCFHDYLRDLTHQQRFDELLALEMKYNQMSPYRELGRYQHWLIEKPNCQEE

SEQ ID NO: 155791 - DNA, 780 bp, Vibrio fischeri ES114
  CDS (1)..(780): transl_table=11
atgaataaagaccgtaatttcgacgacatcgcccacaaatttgcgaagaacatttatggttccgacaagggcgggatccgtcaaacaattgtatggcaagatatggaaactatcttagctgaaaataatgcaaaatctgagccacttaccgttttagatgccggtggtgggattggacaagtttctcagcaaattgcaaaacgcggtcattcagtaacgttatgtgatatttcttcagaaatgctgaaattagcgaaagaagcagtcgaagacaacggtttattaccgcaatatcaatttattcatactgctgtacaacaaattgaacagtataatgtcggggaggttgatattcttctattccatgcggttatggaatggttagataatccaaaagaagcattagacattcttttaaaacaagtaaaaccgggtggatatgcgtccatcatgttttataaccatcacggccttgtgctcaaaaatgtgatttgtggcaatattcctcatgttttagatggtatgcctcatcgaaaaaggtttaagttacaacctcaaaaaggtctaatgcctaatgacgtgtatcagtggattgaagatgcaggttatgaaattaaaggaaaatcaggcattcgttcatttcatgattacattggtaatatggaatacatgggcgattaccaaatagaagacgtactaaagctcgaagagcagttatgccgtcaagaaccttatctctctcttggccgttatattcacgtatgggcgaagagaaaataa

SEQ ID NO: 155792 - protein, 259 aa, Vibrio fischeri ES114
MNKDRNFDDIAHKFAKNIYGSDKGGIRQTIVWQDMETILAENNAKSEPLTVLDAGGGIGQVSQQIAKRGHSVTLCDISSEMLKLAKEAVEDNGLLPQYQFIHTAVQQIEQYNVGEVDILLFHAVMEWLDNPKEALDILLKQVKPGGYASIMFYNHHGLVLKNVICGNIPHVLDGMPHRKRFKLQPQKGLMPNDVYQWIEDAGYEIKGKSGIRSFHDYIGNMEYMGDYQIEDVLKLEEQLCRQEPYLSLGRYIHVWAKRK

SEQ ID NO: 155793 - DNA, 804 bp, Salmonella enterica
  subsp. enterica serovar Choleraesuis str. SC-B67
  CDS (1)..(804): transl_table=11
atgcaggatcgcaattttgatgacattgctgaaaagttttcccgtaacatttacggcacgaccaaaggacaactgcggcaagccattctgtggcaagacctggatcgcgtgctggaggagattggcgggcgaaaactgcgggtactggatgccggcggcggcgaagggcaaacggcgattaagatggcggaacgcggtcatcaggtgacgttatgcgatctgtctggcgaaatgatcgcccgcgcgcggcaggcggccgaggtaaaaggtgtgagcaaagacatgcattttatacaatgcccggctcaggacgtcgcttcgcatttggaaagcccggttgatctgatattgtttcatgctgtgctggagtgggtagccgatcctgtcggcgtattagaaacgctctggtcagtattgcgccctggcggcgtgctgtcgttgatgttctataacgctaacggtttgctgatgcacaatatggtggcgggtaattttgactacgtgcaggcggggatgcctaaacgcaagaagcgcacgctgtcgcctgactacccgcgcgaccccgcgcaggtgtaccagtggctggaggcgattggctggcagattaccggtaaaaccggcgtgcgtgtgtttcatgattatctgcgtgaaaaacaccagcagcgtgactgttatgagaccctggtcgaactggaaacgcgttattgccgccaggagccgtatattagccttgggcgctacattcatgtcaccgcgattaaaagcccggcgctagccgcagatgcaaggataacctatgagtga

SEQ ID NO: 155794 - protein, 267 aa, Salmonella enterica
  subsp. enterica serovar Choleraesuis str. SC-B67
MQDRNFDDIAEKFSRNIYGTTKGQLRQAILWQDLDRVLEEIGGRKLRVLDAGGGEGQTAIKMAERGHQVTLCDLSGEMIARARQAAEVKGVSKDMHFIQCPAQDVASHLESPVDLILFHAVLEWVADPVGVLETLWSVLRPGGVLSLMFYNANGLLMHNMVAGNFDYVQAGMPKRKKRTLSPDYPRDPAQVYQWLEAIGWQITGKTGVRVFHDYLREKHQQRDCYETLVELETRYCRQEPYISLGRYIHVTAIKSPALAADARITYE

SEQ ID NO: 155795 - DNA, 750 bp, Pseudomonas syringae pv. syringae B728a
  CDS (1)..(750): transl_table=11
atgagtgatcggcatttcgaccagctggcgacccgttttgcagaaaagatctatggcggtgccaagggtgccattcgtctggcagtattgcaggccgacctgaccgagaacctgcccgcgcgaccgcttcgtgtactggatatcggcgccgggctgggccacatgtcgttatggctggccgaacagggtcatcaggtgaccctggccgaacccgccgagccgatgctcgaaggcgcacgccagcgcttcgccgatgccggacagacggcaaccttcattcaggccccgtggcaggcgctgcccgagttactgagcgacacttatgatctggtgctgtgccacgccgtgctggaatggctggccgagccgcacagcatcctcccggtgctgcgtcggctgaccaaggacgatggctggctgtcgctggcgttttacaaccgcgatgccttggtctatcgcaacctgttgaagggccattttcgcaagatgcgcaaaaatgacatggccggagaaaaacagagcctgacgccccagcaaccgctcgacccccgggaactggcggcgcaacttgaaggcctgtggcaagtcgaaacgcgtagcggggtgcgggtatttcacgattacatgccggttgaattccaggctcgggccgagctgacggatctgctggaaatggaactggcgcatcggcgtcatccagcctttgccgggctgggtcgataccttcactggatgtgccgtccggtctga

SEQ ID NO: 155796 - protein, 249 aa, Pseudomonas syringae pv. syringae B728a
MSDRHFDQLATRFAEKIYGGAKGAIRLAVLQADLTENLPARPLRVLDIGAGLGHMSLWLAEQGHQVTLAEPAEPMLEGARQRFADAGQTATFIQAPWQALPELLSDTYDLVLCHAVLEWLAEPHSILPVLRRLTKDDGWLSLAFYNRDALVYRNLLKGHFRKMRKNDMAGEKQSLTPQQPLDPRELAAQLEGLWQVETRSGVRVFHDYMPVEFQARAELTDLLEMELAHRRHPAFAGLGRYLHWMCRPV

SEQ ID NO: 155797 - DNA, 888 bp, Psychrobacter arcticus 273-4
  CDS (1)..(888): transl_table=11
atgccgacaaaacctcaagatattaacaatagcgaagcggcagactctacagaaaatctgacaacacaagcgatagaagaagttgcacgtacggatcgtagctttgatgcgattgccgatcattttgaaaaaaaggtctatggtggtttaaagggagacattcgattagcagtattgcgccgtgatatttttgactattgtgcgcagatgagcggaaaacttgggcgaccgttacgtattttagatgtgggcgcaggactggcgcaaattgcgattgagcttgccattcaagggcataccttggtcatcaatgatatttcagccaatatgttagataaagcgcaggcgagcgttgtacaaggcaatgagaaccctgagaaattggctatcacttggcatgtatgcccgtatcaagagcttgaagaaaaattggctggtaaaacagagaagttcgatttgattatgtgtcacgcactgatcgaatggttagcagaacctatcgaggtgatggacttttttgatcagcaattaaccgataatggggcgctatcgctgtgcttttataatccagcaagttttgattatcgtaacttgataatgggcaattttaatttgcttgataacactgcatataaagcggacaataaaaagagcctaacgcccaatcatccggttgcaaaggaagaggttgaggcttggttagaggttcatcattatcacacggtacttgccagtggtcttcgcgtgttccacgattattcgccgcttaaacgtggcggtcataacgaccctgaagcagtcatacgcatggagctacgctactcgcaattagagccgtataagtggcttggtcgctacttacatatattggcaactcggcacaattaa

SEQ ID NO: 155798 - protein, 295 aa, Psychrobacter arcticus 273-4
MPTKPQDINNSEAADSTENLTTQAIEEVARTDRSFDAIADHFEKKVYGGLKGDIRLAVLRRDIFDYCAQMSGKLGRPLRILDVGAGLAQIAIELAIQGHTLVINDISANMLDKAQASVVQGNENPEKLAITWHVCPYQELEEKLAGKTEKFDLIMCHALIEWLAEPIEVMDFFDQQLTDNGALSLCFYNPASFDYRNLIMGNFNLLDNTAYKADNKKSLTPNHPVAKEEVEAWLEVHHYHTVLASGLRVFHDYSPLKRGGHNDPEAVIRMELRYSQLEPYKWLGRYLHILATRHN

SEQ ID NO: 155799 - DNA, 750 bp, Pseudomonas syringae pv. phaseolicola 1448A
  CDS (1)..(750): transl_table=11
atgagtgatcggcatttcgaccagctggcgacccgctttgcagaaaagatctacggcggtgccaagggagccattcgtctggcggtgctgcaggccgatttgaccgagacgctacccgcacgaccgcttcgcgtgctggatatcggtgccgggctgggccacatgtcactgtggctggccgaacaaggacatgaagtgaccctggccgagcccgccgaacccatgctcgaaggcgcacgtcagcgctttgtcgaggccggacagacggcgaccttcattcaggctccttggcaggcgctgcccggtttactgagcgacacttacgatctggtgctgtgccacgccgtgctggaatggctggccgagccgcacgccatccttccggtactgcgccgcttgacccgcgacgatggctggctgtcactggctttttacaaccgtgatgcgctgatctatcgcaacttgttgaaaggtcatttccgcaagatgcgcaaaaatgacatggccggggaaaagcagagcctgacgccacaacaaccgctcgaccctcgggaactggcgacgcaacttgaaggcctgtggcaagtcgaaacccgtagcggggtgcgggtatttcacgattacatgccggttgaattccaggctcgggccgagctgacggatctgctggaaatggaactggcgcatcggcgtcatccagcctttgccgggctgggtcgataccttcactggatgtgccgtccggtctga

SEQ ID NO: 155800 - protein, 249 aa, Pseudomonas syringae pv. phaseolicola 1448A
MSDRHFDQLATRFAEKIYGGAKGAIRLAVLQADLTETLPARPLRVLDIGAGLGHMSLWLAEQGHEVTLAEPAEPMLEGARQRFVEAGQTATFIQAPWQALPGLLSDTYDLVLCHAVLEWLAEPHAILPVLRRLTRDDGWLSLAFYNRDALIYRNLLKGHFRKMRKNDMAGEKQSLTPQQPLDPRELATQLEGLWQVETRSGVRVFHDYMPVEFQARAELTDLLEMELAHRRHPAFAGLGRYLHWMCRPV

SEQ ID NO: 155801 - DNA, 750 bp, Pseudomonas fluorescens Pf0-1
  CDS (1)..(750): transl_table=11
atgagcgaccgtcatttcgatcagttggcgacccgcttcgccgaaaaaatctacggtggcgccaagggcgcgatccgcctcgctgtgctgcaggccgacctcgccgaagccttgccggatcgtccgttgcgggtgctcgacatcggtggcggcctgggccacatgtcgttgtggctggctgaacgcgggcaccaggtgacgttcaccgagccggccgaaccgatgctcgaaggcgcacgccagcgctttgccgaagccgggcaaaccgcgacgttcattcaggcgccctggcaggaactgctcggccagctcaccgaacccttcgatctggtgctgtgccatgcggtgctggagtggctggccgaaccccacgcgattctgccggtgctgcatcagttgaccaagcccggcggctggctgtcgctggcgttctacaaccgcgatgcactgatttaccggaacctgctcaaaggccatttcaagaaaatgcgcaagaacgacatggccggtgaaaagcagagcctgaccccgcagcagccactcgatccacgggaactggcgacgcaactcgccgggttgtggcaggtcgaaactcagagcggggtgcgggttttccacgattacatgccggtggaattccaggcccgcgccgagttgattgatttgctcgagatggaactcgcccaccgtcgtcacccaggcttcgccgggcttgggcgctacttgcactggatctgccggccgatctga

SEQ ID NO: 155802 - protein, 249 aa, Pseudomonas fluorescens Pf0-1
MSDRHFDQLATRFAEKIYGGAKGAIRLAVLQADLAEALPDRPLRVLDIGGGLGHMSLWLAERGHQVTFTEPAEPMLEGARQRFAEAGQTATFIQAPWQELLGQLTEPFDLVLCHAVLEWLAEPHAILPVLHQLTKPGGWLSLAFYNRDALIYRNLLKGHFKKMRKNDMAGEKQSLTPQQPLDPRELATQLAGLWQVETQSGVRVFHDYMPVEFQARAELIDLLEMELAHRRHPGFAGLGRYLHWICRPI

SEQ ID NO: 155803 - DNA, 780 bp, Thiomicrospira crunogena XCL-2
  CDS (1)..(780): transl_table=11
atggtgaggcaagatcgaaattttgataagttagtcgataaatttgagaaaaaggtctatgacacggttaagggtgagtggcgtttaaaacttctcaaagaagatctaacccccctgaaaaaaggaaataaactctccatttgggatgctggctgcggctttgctcagatcagtcagtggctagctgaatcaggtcatcgcttgaccttatgtgatttatcccatcaaatgttgttgcgagcaaaagctaattttgcacaagctgatttgtttgccgagtttattgaggggcctgttcaagaggtcgcaaaacagatagaaccacaagatttagtcctatttcacgcagttttagaatggttagctcaacctgaggaaactctaaaaatagttactgaacaagtcaaaccaggcggttatctttcattactattttacaaccgaaattcagtagttatcaataacacattaaaaggtaagtggcgtttgcctttcattcttgaagatgcttatcttaataagggtaaaaaactcacaccaccgaatccgcagatcccagaagtagtttgtcagtggctccaagattgggggtttaagattgaaatccataccggaatccgcgtgttccatgactatatgacgcgtgaagttcttgaacagagcgaaatggaagacttgatggctttggaatatcgtttctgccgtgaacccacttaccgtaatatggcgcgttatatccatattcttgccaagaaaaaagatagtttcggtactttatga

SEQ ID NO: 155804 - protein, 259 aa, Thiomicrospira crunogena XCL-2
MVRQDRNFDKLVDKFEKKVYDTVKGEWRLKLLKEDLTPLKKGNKLSIWDAGCGFAQISQWLAESGHRLTLCDLSHQMLLRAKANFAQADLFAEFIEGPVQEVAKQIEPQDLVLFHAVLEWLAQPEETLKIVTEQVKPGGYLSLLFYNRNSVVINNTLKGKWRLPFILEDAYLNKGKKLTPPNPQIPEVVCQWLQDWGFKIEIHTGIRVFHDYMTREVLEQSEMEDLMALEYRFCREPTYRNMARYIHILAKKKDSFGTL

SEQ ID NO: 155805 - DNA, 795 bp, Hahella chejuensis KCTC 2396
  CDS (1)..(795): transl_table=11
atgcaagaagattcaaagggttccccggggcataacttcgacgaactgaaagagcgcttccagaacaatatttacggcacccccaaagggcgcctgcgactggacctgatcaacgaggacctggacgctcatctggcggaacgattgggagagggcgcgtggcggattttggacatcggctgcggcgcggcgatgatcagtggacgactggcgcaagcgggacatcgcctgactctgaccgatctgtccgccgagatgctgacggcggcccgcgctaatctggagtcccttggatcggcgctggcctgcgaagagtggcgtgaaggcccgatgcaggacgttctgccgcaactccagggaccttatgacctaataatcatccacgcggtgctggagtggatggacgacccccgccccgcgctggagctggcgctcagcaaacttcgacccggcggggtgctgtccctggcattttataatcgcaacggcctgatttaccgcaatctgctgcaagggaacttccgcaagcttaagaagaacaactggtactaccgtaaaggcggcctgacgcctcagaatccattagacccggatgaagtctacaattggctggcccaggcggacatgcgcctgatatgcaaacggggcatccgcactttttacgacttcatgcaaaaacccgtagcccgggaacgcagctatgaagacgtactggaaatggagcgcatgcactcccagaaagagccgtacctctccctggggcggtatattcatgtgttgtatcagaaggattag

SEQ ID NO: 155806 - protein, 264 aa, Hahella chejuensis KCTC 2396
MQEDSKGSPGHNFDELKERFQNNIYGTPKGRLRLDLINEDLDAHLAERLGEGAWRILDIGCGAAMISGRLAQAGHRLTLTDLSAEMLTAARANLESLGSALACEEWREGPMQDVLPQLQGPYDLIIIHAVLEWMDDPRPALELALSKLRPGGVLSLAFYNRNGLIYRNLLQGNFRKLKKNNWYYRKGGLTPQNPLDPDEVYNWLAQADMRLICKRGIRTFYDFMQKPVARERSYEDVLEMERMHSQKEPYLSLGRYIHVLYQKD

SEQ ID NO: 155807 - DNA, 789 bp, Saccharophagus degradans 2-40
  CDS (1)..(789): transl_table=11
atggcagatagaaatttcgacgacctagcgccgcgctttgctcgcaacatttacggcagccacaaagggcgggtgcggctagaggtactaaagcgagatttgtgcgattacgttccattattccaaaacttagccggtgttgaagtgttggatatgggagcaggacaagggcatttttcgttgggtttggctgagcagggcgcgcatgtgcacttgtgcgacgtgtctgaaaagatgttagccatggccaaagtgcgctggcaggagatatgcgaggcgcaagcccaagctggtatgccaatcgttggcagtgcaacctttacccagtgcgcgttacagcaactgcctgtgaaggagtatccactggttcttgggcatgcggtattggaatggttagaagatcctcgtcaaggctttggttatttagttgattctgtcgctactggtggctatttgtcggtaattgtttataacgcccacgggttagcgtttaaaaaccttttgcgaggtaatttcaaaaagttcgatcgcaataactttaaagcgtttaaaggtagccttacccccatatcaccgcttactcccgagcaacttatgcaatggggtaagaagctgaaattggagttagttggttttagcgggattcgcgtttttcaggattacattttagacaaaagcattcgcgaagccgacccagatggcttgctagtaaaagaattggagtactcgcgcttagagccgtttagaaatatggcgcgctacctacattttgtgtttaagcggccttag

SEQ ID NO: 155808 - protein, 262 aa, Saccharophagus degradans 2-40
MADRNFDDLAPRFARNIYGSHKGRVRLEVLKRDLCDYVPLFQNLAGVEVLDMGAGQGHFSLGLAEQGAHVHLCDVSEKMLAMAKVRWQEICEAQAQAGMPIVGSATFTQCALQQLPVKEYPLVLGHAVLEWLEDPRQGFGYLVDSVATGGYLSVIVYNAHGLAFKNLLRGNFKKFDRNNFKAFKGSLTPISPLTPEQLMQWGKKLKLELVGFSGIRVFQDYILDKSIREADPDGLLVKELEYSRLEPFRNMARYLHFVFKRP

SEQ ID NO: 155809 - DNA, 798 bp, Escherichia coli UTI89
  CDS (1)..(798): transl_table=11
atggagaaagcaatgcaggatcgcaattttgatgatattgcggaaaagttttcccgtaacatttacggcaccaccaaagggcagcttcgacaggctattctgtggcaggatctcgatcgcgtgctggcggaaatgggcccgcaaaaactgcgtgtgctggatgctggcggtggagaagggcagaccgcaatcaaaatggccgagcgcgggcatcaggtcattttatgcgatctttctgtgcagatgatcgaccgcgcaaaacaggcggcagaagcaaaaggtgtgagcgacaacatgcaatttatacattgcgccgctcaggatgttgcttcgcatttggaaacgcccgttgatctgatattgttccatgcggtgctcgagtgggtggccgatccccgcagcgtattacagaccctgtggtcagtgttgcgtccaggcggcgtgttgtcgttaatgttctacaatgcgcatggtttgttgatgcataacatggtcgccgggaattttgattacgtgcaggcgggaatgccgaaaaagaaaaaacggatgctttcgccagattatccacgcgacccggcgcaggtttatctgtggctggaagaagctggttggcaaattatgggtaagacaggcgttcgcgtgtttcatgattatctgcgcgagaagcaccagcagcgcgactgctatgaagcattacttgaattagaaacgcgttattgccgtcaggaaccgtatattaccctggggcgttatattcatgtcaccgcgcgcaaaccgcagagcaaggataaagtatga

SEQ ID NO: 155810 - protein, 265 aa, Escherichia coli UTI89
MEKAMQDRNFDDIAEKFSRNIYGTTKGQLRQAILWQDLDRVLAEMGPQKLRVLDAGGGEGQTAIKMAERGHQVILCDLSVQMIDRAKQAAEAKGVSDNMQFIHCAAQDVASHLETPVDLILFHAVLEWVADPRSVLQTLWSVLRPGGVLSLMFYNAHGLLMHNMVAGNFDYVQAGMPKKKKRMLSPDYPRDPAQVYLWLEEAGWQIMGKTGVRVFHDYLREKHQQRDCYEALLELETRYCRQEPYITLGRYIHVTARKPQSKDKV

SEQ ID NO: 155811 - DNA, 807 bp, Chromohalobacter salexigens DSM 3043
  CDS (1)..(807): transl_table=11
atgggcagagcgaagcacgaggaggcggccgatgatgccgccaagcgcgatcgggtcttcgacggcctggccgacaagttcgccgccggcttgtacggcacgccgcgtggcgcgattcgcctggcggtgctcgagcatgtcctgccccgtgagttgcccgccgacgctcgtccggcgctggacgtgggcgccggtctggggcagatgagcgagtggctggcccggcgcgggcatgccgtgaccctggtcgagccctcccgggacatgcgcgaacgtgccatggacagggtggcggggctggcggtcacggcgctggatgccacctggcaaacgctggccgagcgtgcacccggcccctgggggctgatcgtctgccatgcggtactggaatggctggccgagccgcgtgacgcctttgcgcgcctggcgtcgctgctggcgcctggcgggtacctgtcggtgatggtcttcaatcgcgatgcgctgcgcttttccaatgtggtcaagggcaatctcgccaaggcgctcgacgaccgtctggaggggctgggcaagcgccagcgcctgacgccgatctcaccgctcaccgatgcccaggtgcgcgcgtggagccaggaggcggggctgtcgctggtctcggtcacgggagtgcgtatcttccatgactatctggccgaccgcgatgtctcgcccgaaaagctcgaccagctcatcgagctcgagtgtcgttactgtcagcaagaccctcactggcggctgggccgttatctgcattacacattgttcaaaccggagaccgcgtcatga

SEQ ID NO: 155812 - protein, 268 aa, Chromohalobacter salexigens DSM 3043
MGRAKHEEAADDAAKRDRVFDGLADKFAAGLYGTPRGAIRLAVLEHVLPRELPADARPALDVGAGLGQMSEWLARRGHAVTLVEPSRDMRERAMDRVAGLAVTALDATWQTLAERAPGPWGLIVCHAVLEWLAEPRDAFARLASLLAPGGYLSVMVFNRDALRFSNVVKGNLAKALDDRLEGLGKRQRLTPISPLTDAQVRAWSQEAGLSLVSVTGVRIFHDYLADRDVSPEKLDQLIELECRYCQQDPHWRLGRYLHYTLFKPETAS

SEQ ID NO: 155813 - DNA, 888 bp, Psychrobacter cryohalolentis K5
  CDS (1)..(888): transl_table=11
atgccaaccaatcctcaatatattaataatagcgatgcggtaaactctacagaaaatgtgacagtacaagcgttaaaagaagatgtgcgtactgaccgcagctttgatgcgattgccgatcattttgagaaaaaggtctatggtggcttaaagggagacattcgattagcagtattgcgccgtgatctttttgaatactgcgcgcagacgagccacaaacttgggcgacctttacgtattttggatgtgggtgcagggcttgcgcaaattgcgattgagcttgcgactcaaggacatatactggtcatcaatgatatctcggccaatatgttagataaggcgcaagagcgcgctgcacaaagtagtgcaaacgatgaaaaattgaatattacgtggtatgtatgcccgtatcaagagcttgaagaaaagctggctgataagacggagaaatttgatttaatcatgtgtcacgcgctacttgaatggttggcagagcctgccgcggtaatggacttttttgaccagcaattatccgataatggagcattatcgctgtgcttttataatccagcaagttttgattatcgtaatttgataatgggtaatttcaacttattagataacactgaatataaagccgatagtaaaaaaagcctgacgcccaatcatccggttgcaaaggaagaggttgaagcttggctacaggcgcatgattatcagactctgatcgccagcggtctgcgcgtattccatgattattcgccgctaaaacgtggtgggcataacgatcctgaagcggtcatacgtatggagttacgctactcgcaactggatccctataagtggcttgggcgctacttacatcttctagcgacacgtgtctcttaa

SEQ ID NO: 155814 - protein, 295 aa, Psychrobacter cryohalolentis K5
MPTNPQYINNSDAVNSTENVTVQALKEDVRTDRSFDAIADHFEKKVYGGLKGDIRLAVLRRDLFEYCAQTSHKLGRPLRILDVGAGLAQIAIELATQGHILVINDISANMLDKAQERAAQSSANDEKLNITWYVCPYQELEEKLADKTEKFDLIMCHALLEWLAEPAAVMDFFDQQLSDNGALSLCFYNPASFDYRNLIMGNFNLLDNTEYKADSKKSLTPNHPVAKEEVEAWLQAHDYQTLIASGLRVFHDYSPLKRGGHNDPEAVIRMELRYSQLDPYKWLGRYLHLLATRVS

SEQ ID NO: 155815 - DNA, 750 bp, Pseudomonas entomophila L48
  CDS (1)..(750): transl_table=11
atgaacgaccgtcacttcgatgaactggccacccgtttcgccgagaagatctacggcggcgccaagggcgccatccgcctggcggtgctccaggccgacctggccgagacgctgcccgaccgcccgctgcgtattctcgacatcggcgcgggcctgggccacatggccctgtggctggcccagcgcggccatcacctgaccctcgccgaacccgccacgcccatgctcgacggcgcccgcgagcgcttccagcaagccggccaggccgccgagttcatccaggcgccctggcaggacctgctgggccagctcaccgagccctacgacgtggtgctgtgccacgccgtgctggaatggctggccgagcccgagagcatcctgccggtgctgcaccagttgaccgcaccgggggggtggctgtcgctggccttctacaaccgcgatgcgctggtctaccgcaacctgctcaaggggcatttccgcaagctgcgcagcaaccgcatggccggcgagaaacagagcctgaccccacaaaaaccacttgatccacgggacctcaaggcgcaacttgaacctctgtggcaggtcgaaagcgagagtggcgtgcgcgtgttccacgactacatgcccaaggagttccaggaaaaggccgagctgctcgacctgctggaaatggaactggcccaccgtcgccacccgggctttgccgggctgggccgctacctgcactggatctgccgcccccactga

SEQ ID NO: 155816 - protein, 249 aa, Pseudomonas entomophila L48
MNDRHFDELATRFAEKIYGGAKGAIRLAVLQADLAETLPDRPLRILDIGAGLGHMALWLAQRGHHLTLAEPATPMLDGARERFQQAGQAAEFIQAPWQDLLGQLTEPYDVVLCHAVLEWLAEPESILPVLHQLTAPGGWLSLAFYNRDALVYRNLLKGHFRKLRSNRMAGEKQSLTPQKPLDPRDLKAQLEPLWQVESESGVRVFHDYMPKEFQEKAELLDLLEMELAHRRHPGFAGLGRYLHWICRPH

SEQ ID NO: 155817 - DNA, 759 bp, Pseudoalteromonas atlantica T6c
  CDS (1)..(759): transl_table=11
atgcacagcgaaaagcgtgatcaaaattttgatgccattgcagataagtttgaaaagaacatttatggaacaaccaaaggtcgcttgcgccacgagttacttcaatatcatttacgcaaaaatatcgatttttcaacattaagcatcgcccttgacgccggtggtggcacaggtgaaatgtcacgggtactgcttcagtcgggcgtgaatgtaaccttgagtgacatttcaaatgaggcactagccatcgctaagcaaaaatgcagtgagtctagcgcgctttcagtgattcatagcgatatattaggcttacctgattgtgaatatgatttagtcatttgccatgctgtactcgaatggttaaatgatccttatgttaatgttcgaaaactaatttcgatgacgaaaattggcggctatttttcgctgacgttctttaacaaagatgcgcaaatgctcggcaacttactctatggaaattttgattacgttaaacaaggcatgaaggtgaagaatcgggtacgcctgagtccgaacaaaccgcttcaacccagagctgtgattgattttttgcagaaacagcccgtttcgattatatctacggcggggatccgctgctttcacgactacttaaaagaccccacaatgcaactaagtcactatgaacaactcaaagaagccgaaatggcattcggtgataaagagccttatatgtggttaggcaaatacttccacattcttatgcgcagagacgcctga

SEQ ID NO: 155818 - protein, 252 aa, Pseudoalteromonas atlantica T6c
MHSEKRDQNFDAIADKFEKNIYGTTKGRLRHELLQYHLRKNIDFSTLSIALDAGGGTGEMSRVLLQSGVNVTLSDISNEALAIAKQKCSESSALSVIHSDILGLPDCEYDLVICHAVLEWLNDPYVNVRKLISMTKIGGYFSLTFFNKDAQMLGNLLYGNFDYVKQGMKVKNRVRLSPNKPLQPRAVIDFLQKQPVSIISTAGIRCFHDYLKDPTMQLSHYEQLKEAEMAFGDKEPYMWLGKYFHILMRRDA

SEQ ID NO: 155819 - DNA, 786 bp, Shigella flexneri 5 str. 8401
  CDS (1)..(786): transl_table=11
atgcaggatcgcaattttgatgatattgcggaaaagttttcccgtaacatttacggcaccaccaaagggcagcttcgacaggctattctgtggcaggatctcgatcgcgtgctggcggaaatgggcccgcaaaaactgcgtgtgctggatgctggcggcggagaagggcagaccgcaatcaaaatggccgagcgcgggcatcaggttattttatgcgatctttctgcgcagatgatcgaccgcgcaaaacaggcggcagaagcaaaaggtgtgagcgacaacatgcaatttatacattgcgccgctcaggatgttgcttcgcatttggaaacgcccgttgatctgatattgttccatgcggtgctcgagtgggtggccgatccccgcagtgtattgcagaccctgtggtcagtgttgcgtccaggcggagtgtcgtcgttaatgttctacaatgcgcatggtttgttgatgcataacatggtcgccgggaattttgattacgtgcaggcgggaatgccgaaaaagaaaaaacggacgctttcgccagattatccacgcgacccggcgcaggtttatctgtggctggaagaagctggttggcaaattatgggtaagacaggcgttcgcgtgtttcatgattatctgcgcgagaagcaccagcagcgcgactgctatgaagcattacttgaattagaaacgcgttattgccgtcaggaaccgtatattaccctagggcgttatattcatgtcaccgcgcgcaaaccgcagagcaaggataaagtatga

SEQ ID NO: 155820 - protein, 261 aa, Shigella flexneri 5 str. 8401
MQDRNFDDIAEKFSRNIYGTTKGQLRQAILWQDLDRVLAEMGPQKLRVLDAGGGEGQTAIKMAERGHQVILCDLSAQMIDRAKQAAEAKGVSDNMQFIHCAAQDVASHLETPVDLILFHAVLEWVADPRSVLQTLWSVLRPGGVSSLMFYNAHGLLMHNMVAGNFDYVQAGMPKKKKRTLSPDYPRDPAQVYLWLEEAGWQIMGKTGVRVFHDYLREKHQQRDCYEALLELETRYCRQEPYITLGRYIHVTARKPQSKDKV

SEQ ID NO: 155821 - DNA, 789 bp, Shewanella sp. MR-4
  CDS (1)..(789): transl_table=11
atgcaagataagaatttcgataaactcgcgcaaaagttcgcgaagaacatttatggcacccctaaaggtgaaatccgtgccgccgtgttatggcgcgatcttgctcccgccttggcgcaattgggcgataaaaaactgcggattttagatgcgggcggcggctttggttatttcagccaaaagctggcacgtctgggccatgaagtggtgttgtgcgatatttccgccgaaatgctcgcccaagcgaaagcacaaatcgatgccagcgacacgccattggcaatccgtttggttcacgcaccgattcaagatctctcagtcgccgaacatggcaagttcgatcttatcctctgccatgccgtagtcgaatggctggccgatgcgaaaaccaccatggaaggtttgctgaccatgcttaagcccaatgggctgttttcgctgatgttttacaataaagaagcgatgcgcttccatgcgttagtgtcgggtaatttcgactatgttgccgccgatcttaaggtgaagaagaaggtgcgcctcacgcccacgcacccgctttatattcatgatgttaaacaatggtttgccgaatggcacatgaccctgctgcgcgaatcaggcgtgcgagtcattcacgactatttgaaaaaacaccagcctgcggattttgactatcaaaagctgctgacgatggagctcgaatattcccaacgtgagccctatatttcgctcggtcgttatgtgcattttctggggcaaagcgccgcagcgccccaagcacccgagtaa

SEQ ID NO: 155822 - protein, 262 aa, Shewanella sp. MR-4
MQDKNFDKLAQKFAKNIYGTPKGEIRAAVLWRDLAPALAQLGDKKLRILDAGGGFGYFSQKLARLGHEVVLCDISAEMLAQAKAQIDASDTPLAIRLVHAPIQDLSVAEHGKFDLILCHAVVEWLADAKTTMEGLLTMLKPNGLFSLMFYNKEAMRFHALVSGNFDYVAADLKVKKKVRLTPTHPLYIHDVKQWFAEWHMTLLRESGVRVIHDYLKKHQPADFDYQKLLTMELEYSQREPYISLGRYVHFLGQSAAAPQAPE

SEQ ID NO: 155823 - DNA, 771 bp, Shewanella frigidimarina NCIMB 400
  CDS (1)..(771): transl_table=11
atgcaagataaaaacttcgataaacttagccaaaagtttgcccaaaatatttacggtaccactaaaggtgaaatccgtgctgcagtattatggcgcgacttagcacctgccctagccagccttggcaaaccacgattacgtattttagatgccggtggcggttttggttatttgagtcaaaaactagcggctttaggtcatgatgttgtgttgtgtgatatttcagaacaaatgcttgccctagcacggcaacagattgaagcgtcaaataccgcattatcgatacagttaatccacagcccaatacaagcattaaccgttgaagagtatggtcaatttgatgtcattctctgccatgcggtagcagaatggctaattgatgctcgtagcaccttgcaaggtttattgagtttgctaaaacctcatggtttattttctctgatgttttttaataaagaagccttacggtttcatagcttaatatcaggtaattttgactatgttaaccgtgactttaaggtcaaaaagaaggtcggattaacgccgactcacccgctgtatattgaagatgtccgcagttggtttagccaatggcaactgtcgatggtgagtcaatcgggggtaagagttatcaatgattacttgaaaaataatctgccacctaacttcgacaaacatcaactgattgaaatggagttggcctactcgcaacaagaaccttatttgtcgcttgggcgctacattcactttgtaggccgatcgactccataa

SEQ ID NO: 155824 - protein, 256 aa, Shewanella frigidimarina NCIMB 400
MQDKNFDKLSQKFAQNIYGTTKGEIRAAVLWRDLAPALASLGKPRLRILDAGGGFGYLSQKLAALGHDVVLCDISEQMLALARQQIEASNTALSIQLIHSPIQALTVEEYGQFDVILCHAVAEWLIDARSTLQGLLSLLKPHGLFSLMFFNKEALRFHSLISGNFDYVNRDFKVKKKVGLTPTHPLYIEDVRSWFSQWQLSMVSQSGVRVINDYLKNNLPPNFDKHQLIEMELAYSQQEPYLSLGRYIHFVGRSTP

SEQ ID NO: 155825 - DNA, 777 bp, Aeromonas hydrophila subsp. hydrophila ATCC 7966
  CDS (1)..(777): transl_table=11
ttgaagcaagatcagagttttgacgggcgcgccgacaagttcgctcgcaacatttatgactccaccaaggggcgcatccgcaccacagtggtgtggagcgacatcgaagcctgcctggcccgccttggcaaccggccgctgcgcatcctggatgcggggggcggctttggctatttcgcccagaagctggcggccatgggccatcaggtggagctgtgcgatctgtcggcggaaatgctggcattggcccgcagccagatcgccgagaaggggctggaagacagaattcgtctcatccattgccccattcaggatcttaaagcacacgtgaccggcaccttcgatctggtgctctgtcacgcggtgctggagtggctcgccgagccgcgccagaccttgctcggtctgttccctttcgtcaatgccgggggcatactgtcgctgcttttttacaaccgtcacggtctgctgttccagagcctggtggtgggcaattttgactatgtgcgccaggggctcaacaagaagcgccagactgcgctgacccccaccaatccccagctgccggagcaggtctacgactggattggccggggcgggctcaagatcatcggcaagaccggggtgcgggtgatccacgactacatgcgccacaagcaggatcagcgggaaaagttcgaggatctgctggccatggagctgcaatattgccggcaggagccgtttatctccctggggcgctatatccacgtgatggcgcaaaaaaccaccggttga

SEQ ID NO: 155826 - protein, 258 aa, Aeromonas hydrophila subsp. hydrophila ATCC 7966
MKQDQSFDGRADKFARNIYDSTKGRIRTTVVWSDIEACLARLGNRPLRILDAGGGFGYFAQKLAAMGHQVELCDLSAEMLALARSQIAEKGLEDRIRLIHCPIQDLKAHVTGTFDLVLCHAVLEWLAEPRQTLLGLFPFVNAGGILSLLFYNRHGLLFQSLVVGNFDYVRQGLNKKRQTALTPTNPQLPEQVYDWIGRGGLKIIGKTGVRVIHDYMRHKQDQREKFEDLLAMELQYCRQEPFISLGRYIHVMAQKTTG

SEQ ID NO: 155827 - DNA, 786 bp, Shewanella sp. ANA-3
  CDS (1)..(786): transl_table=11
atgcaagataagaatttcgataaactcgcgcaaaaattcgcgaagaacatttatggcacccctaaaggtgaaatccgtgccgccgtgttatggcgcgatctcgctcccgccttggcgcaatttggcgataaaaaactgcggattttagatgcgggcggcggctttggttatttcagccaaaagctggcacgtctgggccatgaagtggtgctgtgcgatatttccgctgaaatgcttgcccaagcgaaaacacaaatcgatgccagcgacacgccatttgctatccgtttagtgcacgcgccgattcaggccctctccgtcgccgaacatggcagattcgatcttatcctttgccatgccgtagtcgaatggctggccgatgcgaaaaccaccatggaaggcttgctgaccatgcttaagcccaatgggctgttttcgctgatgttttacaataaagaagcgatgcgcttccatgcattagtgtcgggtaatttcgactatgttgccgccgatcttaaggtgaagaagaaggtgcgcctcacgcccacgcacccgctttatattcatgatgttaaacaatggtttgccgaatggaatatggatctgctgcgcgagtcgggtgtgcgagtcattcacgactatttgaaaaaacatcagccagcggattttgactatcaaaagctgctgacgatggagctcgagtattcccaacgcgagccctatatttcgctcggtcgttatgtgcattttctggggcaaagcgccgcaaccgacacatccgcataa

SEQ ID NO: 155828 - protein, 261 aa, Shewanella sp. ANA-3
MQDKNFDKLAQKFAKNIYGTPKGEIRAAVLWRDLAPALAQFGDKKLRILDAGGGFGYFSQKLARLGHEVVLCDISAEMLAQAKTQIDASDTPFAIRLVHAPIQALSVAEHGRFDLILCHAVVEWLADAKTTMEGLLTMLKPNGLFSLMFYNKEAMRFHALVSGNFDYVAADLKVKKKVRLTPTHPLYIHDVKQWFAEWNMDLLRESGVRVIHDYLKKHQPADFDYQKLLTMELEYSQREPYISLGRYVHFLGQSAATDTSA

SEQ ID NO: 155829 - DNA, 771 bp, Shewanella amazonensis SB2B
  CDS (1)..(771): transl_table=11
ttgcaagacaagaatttcgataccctcgcgggtaagtttgccaagaacatctacggtaccctcaagggagatattcgcgcggccgtactgtggcgcgacctggaagaaatgctgccactgttgggtgaacgcaggctcagggtactggatgcaggcggcggatttggctttttcagtcaaaagctggcggcactgggtcacagtgtggtgctgtgtgatatttctgccgaaatgctcgccgaggccaagcggcatatcgccctcagccccaccccactggacatccagtgcattcatgcccccattcaggacttatcccgggatgccctgggggagttcgacctgatcctgtgtcacgccgtggtggaatggctagccgatgccaaaggcaccatgacaagcctgttgacactgctcaagccgggcggcttgttttcactgatgttttataaccgtgatgccatgtgtttccactcactcattgccggtaacttcggctatgtacagtcaggatttaaggccaaaagggttaagctcagccccaacttcccggtgacagtgcccgaggtggaagcctggtgtgacggctggcagatggacattcactgtcgctccggcgtgcgggtgattcacgactatttgaaaaaaggcagcctttccaccgagtacagtgataccgggctgattgagatggagctgaaatactcccgcgaacctgcctttttacgactggggcgctacgtgcactttgtggcccaaaagcccctgtag

SEQ ID NO: 155830 - protein, 256 aa, Shewanella amazonensis SB2B
MQDKNFDTLAGKFAKNIYGTLKGDIRAAVLWRDLEEMLPLLGERRLRVLDAGGGFGFFSQKLAALGHSVVLCDISAEMLAEAKRHIALSPTPLDIQCIHAPIQDLSRDALGEFDLILCHAVVEWLADAKGTMTSLLTLLKPGGLFSLMFYNRDAMCFHSLIAGNFGYVQSGFKAKRVKLSPNFPVTVPEVEAWCDGWQMDIHCRSGVRVIHDYLKKGSLSTEYSDTGLIEMELKYSREPAFLRLGRYVHFVAQKPL

SEQ ID NO: 155831 - DNA, 774 bp, Shewanella sp. W3-18-1
  CDS (1)..(774): transl_table=11
atgcaagataagaattttgataagctcgcgcacaagtttgcgaaaaatatttatggcaccccaaaaggggaaattcgtgcagccgtgttatggcgagatctcagctctgcgttagccccatttggcgataaaaaactccgaattttagatgctggcggtggctttggtttctttagccaaaagctggcacgccttggccatgaagtcgtactttgcgatatctcacaagagatgcttatccaagcccaagcacatattgatgcctctaccgagcctttaaatattgagcttatccatgcccctatccaagcattatcagttgaacaacatggtgttttcgatctcatactgtgccatgccgtagttgaatggcttaccgatgcccagcgtacgatggaaggattgctgacgatgctaaaacccaatgggttgttttcactgatgttttataacaaagaagcaatgcgtttccatgccttaatatcaggaaattttgactacgtggccgcagatcttaaagtaaagaaaaaagtgaggctaacccccacacacccgctttatattcaagaggttaagcaatggtttatggattgggaaatgacgttaataagccaatctggggtgagggttatccacgattacttgaaaaagagccaagctgcagattttgattaccaaaaacttctgcagatggaactcgaatattcccagcacgagccgtatatatcacttggcagatatgtccatttcttaggtattagtcgaggaacatag

SEQ ID NO: 155832 - protein, 257 aa, Shewanella sp. W3-18-1
MQDKNFDKLAHKFAKNIYGTPKGEIRAAVLWRDLSSALAPFGDKKLRILDAGGGFGFFSQKLARLGHEVVLCDISQEMLIQAQAHIDASTEPLNIELIHAPIQALSVEQHGVFDLILCHAVVEWLTDAQRTMEGLLTMLKPNGLFSLMFYNKEAMRFHALISGNFDYVAADLKVKKKVRLTPTHPLYIQEVKQWFMDWEMTLISQSGVRVIHDYLKKSQAADFDYQKLLQMELEYSQHEPYISLGRYVHFLGISRGT

SEQ ID NO: 155833 - DNA, 759 bp, Azotobacter vinelandii
  CDS (1)..(759): transl_table=11
atgagcgaccgccacttcgacgacctggccctgcgtttcgccgagaagatctacggcggcgccaagggcgcgatccgcctcgccgtgctccaggccgacctggccgaagtcttgcccgaacgcccgctgcgggtgctcgacgtcggtgccggactcggccacatggcgctctggctggccaagcgcggccacctcgtgaccctcgccgagccggctgcgccgatgctcggtgccgcccgcgaacgcttcgccgccgccggccagcgggccactttcgtccaggcaccctggcaggaactgcccggccggctcgatgcccccttcgatctggtgctctgccacgccgtgctggaatggctggccgagccgctgcgcatcctccccgtgctgcaccagttcagcgcacccggcggctggctgtcgctggccttctacaataaggacgcgctgatctaccgcaacctgctcaagggccacttccgcaagctgcgcaaggaacagttcgccggcgaaggccgcagcctgaccccgcagcgcccgctcgacccgcgcgagctgaaggccgcgatgcagagcgcctggcggatcgacggcgaaagcggcgtgcgggtcttccacgactacatgccggtggaattccaggcccgggcggaactgcccgaccttctggaaatggaactggcctaccgccgtcacccggccttcgccggtctcggccgctacctgcattggctctgccggccacatccgacttgctaa

SEQ ID NO: 155834 - protein, 252 aa, Azotobacter vinelandii
MSDRHFDDLALRFAEKIYGGAKGAIRLAVLQADLAEVLPERPLRVLDVGAGLGHMALWLAKRGHLVTLAEPAAPMLGAARERFAAAGQRATFVQAPWQELPGRLDAPFDLVLCHAVLEWLAEPLRILPVLHQFSAPGGWLSLAFYNKDALIYRNLLKGHFRKLRKEQFAGEGRSLTPQRPLDPRELKAAMQSAWRIDGESGVRVFHDYMPVEFQARAELPDLLEMELAYRRHPAFAGLGRYLHWLCRPHPTC

SEQ ID NO: 155835 - DNA, 804 bp, Yersinia bercovieri ATCC 43970
  CDS (1)..(804): transl_table=11
ttggcggagcagttgttcatgcaggatcgtaatttcgatgatattgccgaaaagttctcccgcaatatctacggtacgacgaagggaatgattcgtcaggcggtggtttggcaagatattaccgagctgttagtgcagttaccgcaacggccgttacggattttagatgccggaggcggcgaagggcatatggcatgtcaactggcggcattaggccaccaggttctattatgtgacctctctgctgagatgatccagcgtgctaaagccgcggctcaggaaaaaggtgtgagccacaacatgcaatttgtacaaagtgcggctcaagatatcacccgacatttagaacagccggttgatctgatattgttccatgcggttttagaatggattgcagagccacaagaagttctgcaaatactttttaatgcgctaaagcccggaggtgcgctctcattgatgtttttcaatgccaatgggctggtaatgcgcaatgcagtattaggtaattttcagttggcgataccgggtttaaaaaggcgtcgacagcgctcgctgtcaccgcaataccctttagatccgccgacggtatatggttggcttgagcaaatgggtctatccattagcggcaagacgggagtccgggtgtttcacgattacatgaaaaataaacagcaacaagtcgatgagtttgctgaattattggcgttagaacagcgctattgccggcaggagccgtttatcagcctggggcgctacgtgcatgtctcggcgtttaagccgaatctgaaggacccattatga

SEQ ID NO: 155836 - protein, 267 aa, Yersinia bercovieri ATCC 43970
MAEQLFMQDRNFDDIAEKFSRNIYGTTKGMIRQAVVWQDITELLVQLPQRPLRILDAGGGEGHMACQLAALGHQVLLCDLSAEMIQRAKAAAQEKGVSHNMQFVQSAAQDITRHLEQPVDLILFHAVLEWIAEPQEVLQILFNALKPGGALSLMFFNANGLVMRNAVLGNFQLAIPGLKRRRQRSLSPQYPLDPPTVYGWLEQMGLSISGKTGVRVFHDYMKNKQQQVDEFAELLALEQRYCRQEPFISLGRYVHVSAFKPNLKDPL

SEQ ID NO: 155837 - DNA, 786 bp, Yersinia mollaretii ATCC 43969
  CDS (1)..(786): transl_table=11
atgcaggatcgtaatttcgatgatattgccgaaaagttctcccgcaatatctacggtacgacgaagggaatgattcgtcaggcagtggtttggcaagatattaccgagctgctcgcgcaattgccgcagcgaccgttacggattttagatgccggagggggcgaagggcatatggcttgccaactggcggcattaggccatcaggttctattatgtgacctgtctgctgagatgatccagcgtgcaaaagctgcggctcaggaaaaaggtgtgagccacaacatgcaatttgtacaaagtgcggctcaagatatcacccaacatttagaacagccggttgatctgatattgttccatgcggttttagaatggattgcagagccacaagaagttctgcaaatactttttaatacgttaaacccaggtggcgcactctcattgatgtttttcaatgccaatgggttggtgatgcgcaatgcggtattaggtaactttcagttggcgataccgggtttaaaaaggcgtcgacagcgctcgctgtcaccgcaataccctctagatccgccgacggtatatggttggcttgagcaaatgggtttatccatttgcggcaagacgggagtacgggtgtttcacgattacatgaaaaataaacagcaacaagtcgatgagtttgctgaattattggcgttggaacagcgctattgccggcaggagccctttatcagcttggggcgctacgtgcatgtcatggcgtttaagccgaatctgaaggacccattatga

SEQ ID NO: 155838 - protein, 261 aa, Yersinia mollaretii ATCC 43969
MQDRNFDDIAEKFSRNIYGTTKGMIRQAVVWQDITELLAQLPQRPLRILDAGGGEGHMACQLAALGHQVLLCDLSAEMIQRAKAAAQEKGVSHNMQFVQSAAQDITQHLEQPVDLILFHAVLEWIAEPQEVLQILFNTLNPGGALSLMFFNANGLVMRNAVLGNFQLAIPGLKRRRQRSLSPQYPLDPPTVYGWLEQMGLSICGKTGVRVFHDYMKNKQQQVDEFAELLALEQRYCRQEPFISLGRYVHVMAFKPNLKDPL

SEQ ID NO: 155839 - DNA, 786 bp, Yersinia intermedia ATCC 29909
  CDS (1)..(786): transl_table=11
atgcaggatcgcaatttcgatgatattgctgagaaattttcccgcaatatctatggtacgacgaagggaatgattcgtcaggcagtggtttggcaagatatcaccgagctgttagcgcagttgccgccacgcccgttgcggattttagatgcgggtgggggcgaagggcatatggcttgccaactggcggcattaggccatcaggttctattatgtgacctgtcagcggagatgatccagcgtgcgaaagctgcggccttggaaaaaggtgtgagccacaacatgcaatttgtacaaagtgcggctcaggacatcacccaacatttagaacagccggttgatctgatattgttccatgcggttttagaatggattgcagaaccccaacacgttctgcaagtactctttaatgcgttagcccccggtggcgcgctctcattgatgtttttcaatgccaatgggttggtgatgcgtaatgcggtattgggtaactttcagttggcgataccgggtgtaaaaaggcgtaggcagcgttcgctgtcaccgcaataccctttagatccaccaacggtatatggttggcttgagcaaatgggtttatccattagcggtaagacgggagtacgggtgtttcacgattacatgaaaaataaacagcaacaagttgatgagtttgctgaattattggcgctggaacagcgctattgccggcaggagccctttatcagcctggggcgctacgtgcatgtcatggcgtttaagccgaatctgaaggacccactatga

SEQ ID NO: 155840 - protein, 261 aa, Yersinia intermedia ATCC 29909
MQDRNFDDIAEKFSRNIYGTTKGMIRQAVVWQDITELLAQLPPRPLRILDAGGGEGHMACQLAALGHQVLLCDLSAEMIQRAKAAALEKGVSHNMQFVQSAAQDITQHLEQPVDLILFHAVLEWIAEPQHVLQVLFNALAPGGALSLMFFNANGLVMRNAVLGNFQLAIPGVKRRRQRSLSPQYPLDPPTVYGWLEQMGLSISGKTGVRVFHDYMKNKQQQVDEFAELLALEQRYCRQEPFISLGRYVHVMAFKPNLKDPL

SEQ ID NO: 155841 - DNA, 786 bp, Vibrio splendidus 12B01
  CDS (1)..(786): transl_table=11
gtgactgaagaccgtaatttcgacgatattgcccacaaatttgcaaaaaatatttacggctctgacaaaggagagatccgtcagatcatcgtatgggaagatttagaacaagctttgagcaaatttgagcaatcagcttcgccgctgcatgtgcttgatgctggaggcggccttgcgcagatatcgcaaaaaattgcgtcgcttgggcataacgtttctctttgtgacctctcttctgaaatgctgaagctagcagaagaaagtatcagcgaggcgggtttgttagatcagtatcgattcatccattctccggtacaaaaagtcgcagaacatctcgatgaaaaagtcgattttgtgatgtttcatgcggtaatggaatggctcgcagatcctaaagaggcgcttgatttattactggaacaagtaaaacccggtggtgttgcctcgataatgttttacaaccaccacggattagtcctgaaaaatgtgatttgtggcaacattcctcatgtattgaatgggatgccacatcgaaaacggtttaagctgcaaccacaaaaaggcttgaagccagaagaggtttatcaatggatagaagacgccggtctagaaatctgtggtaaatcaggcattcgttccttcagtgactacataggtaatatggagtacatgggcgattaccaatttgaagatgtattggaactagaaaaacagctatgtcgccaagagccatatctgtcgctaggccgttatattcacgtttgggctcaaaaacctgcgcaataa

SEQ ID NO: 155842 - protein, 261 aa, Vibrio splendidus 12B01
MTEDRNFDDIAHKFAKNIYGSDKGEIRQIIVWEDLEQALSKFEQSASPLHVLDAGGGLAQISQKIASLGHNVSLCDLSSEMLKLAEESISEAGLLDQYRFIHSPVQKVAEHLDEKVDFVMFHAVMEWLADPKEALDLLLEQVKPGGVASIMFYNHHGLVLKNVICGNIPHVLNGMPHRKRFKLQPQKGLKPEEVYQWIEDAGLEICGKSGIRSFSDYIGNMEYMGDYQFEDVLELEKQLCRQEPYLSLGRYIHVWAQKPAQ

SEQ ID NO: 155843 - DNA, 777 bp, Idiomarina baltica OS145
  CDS (1)..(777): transl_table=11
atgaataaaaaacaagcacgtggcaatttcacgggtatcagtcaaaagttcgcccgaaatatttacggctcgaccaagggccgactgcgcatggccgtgttgaagcgtgacttagcgccactcattgatgggcctaagcgaacaatattggatgttggcgcaggcttaggccaagtgaatgagtggtttcttacgaaagggcatgcggtgattcacactgatattgctgccgatatggtcgaagaagcacaacaaaatcatgagcaattaggtttaacacgaagagctcagtacatcgtggctccactcgaagcgctcacagcgcagttacctgatcaacagttcagtttggtgttatgccacgcggtactcgaatgggttgaagacggtgagcaggcaattcagtgcttatctcaattacttaagcctggcggaactttgtccttaatgttttataatcgcgatgcacaattaatggcaaatgcggtctatggtaattttgattatatagcgcgcggcttaaaagttaaaaaaacggtccgtttaagtcctcaacagccgcgcaggccgcaggatgttgaaaagtggctctcagaggcgggcttgcaggtggatactaaaacgggcgtgcgctgttttcatgactatctgcgcgaagtcgagcaccagcaacgctatgatgagttgttggatcttgaaatggaatataatcaacaatcaccgtttcgagagttaggtcgttatcaacattggttgattcgcaagccggacaagtaa

SEQ ID NO: 155844 - protein, 258 aa, Idiomarina baltica OS145
MNKKQARGNFTGISQKFARNIYGSTKGRLRMAVLKRDLAPLIDGPKRTILDVGAGLGQVNEWFLTKGHAVIHTDIAADMVEEAQQNHEQLGLTRRAQYIVAPLEALTAQLPDQQFSLVLCHAVLEWVEDGEQAIQCLSQLLKPGGTLSLMFYNRDAQLMANAVYGNFDYIARGLKVKKTVRLSPQQPRRPQDVEKWLSEAGLQVDTKTGVRCFHDYLREVEHQQRYDELLDLEMEYNQQSPFRELGRYQHWLIRKPDK

SEQ ID NO: 155845 - DNA, 786 bp, Vibrio sp. MED222
  CDS (1)..(786): transl_table=11
atgactgaagaccgtaatttcgacgatattgcccacaaatttgcaaaaaacatttacggctctgacaaaggagagatccgtcagtgcatcgtatgggaagatttagaacaagctttgagcaagtttgatcaatccgcttcgccgctgcatgtgcttgatgccggtggtgggcttgcacagatgtcacaaaaaattgcgacactaggccacaacgtttctctgtgcgacctttcttctgaaatgttgaagctcgcagaagaaagtatcagcgaagcgggtttgctcgagcaatatcgatttattcattctccggtacaaaaagtggcagagcatctcgaagagaaagtcgattttgtgatgtttcatgccgtaatggaatggttagcagaccctaaacaggcacttgatttattgttggaacaagtaaaacccggtggtattgcctcgataatgttttacaaccaccatggtttagtcctgaaaaatgtgatttgtggcaacattcctcatgtattgaatgggatgccacatcgaaaaaggtttaagctgcaaccacaaaaaggcttgaagcctgaagaggtttatcaatggatagaagacgctggtctagatatctgtggtaaatcaggcattcgctctttcagtgactacataggcaatatggagtacatgggcgattaccaatttgaagatgtgttggaactagagaaacagctatgtcgccaagagccatatctgtcgctaggccgttatattcacgtttgggctcaaaaacctgcgcaataa

SEQ ID NO: 155846 - protein, 261 aa, Vibrio sp. MED222
MTEDRNFDDIAHKFAKNIYGSDKGEIRQCIVWEDLEQALSKFDQSASPLHVLDAGGGLAQMSQKIATLGHNVSLCDLSSEMLKLAEESISEAGLLEQYRFIHSPVQKVAEHLEEKVDFVMFHAVMEWLADPKQALDLLLEQVKPGGIASIMFYNHHGLVLKNVICGNIPHVLNGMPHRKRFKLQPQKGLKPEEVYQWIEDAGLDICGKSGIRSFSDYIGNMEYMGDYQFEDVLELEKQLCRQEPYLSLGRYIHVWAQKPAQ

SEQ ID NO: 155847 - DNA, 834 bp, Photobacterium sp. SKA34
  CDS (1)..(834): transl_table=11
gtgatcaaagaccgaaattttgatgatttagcgcaaaagttcgctgaaaacatatatggcacagcaaaagggcaaattcgacaaactgtcgtttggcaagatattgaacaaattcttacctcgcttagcagtgtatcacctcttactgtattagatgcagggggaggtattggacaattgtcacaaaaaattgcatcgcttggacatcaagtaacgttatgtgatctttctagcgaaatgttgacattagctcaacaagaaattgctaaaaacggtttgcttgagcaatatcgtttagtgcattgtcctgtgcaggaaattggtgagttcatacctgaacctgtcgatttaattttatttcatgcagtaatggaatggttagctgaaccaatcgaggtacttactggtctattacacaatgtgaaacctggcggtgcaatttccgtaatgttttataactacaacggtctactgtttaaaaacttaatttgtggcaacttgactcatattgagcaaggaatgccacatcgcaagcgctttaaattgcagccgcagcaagggataaaaccagaagaggtttatcagtgcctaaccgatgcagggtttgaaatcataggtaaaacaggggttcgtaccttccatgattatattcaaacccatatggttggtgactacagttttgaacaggttcttgagatggagcagaagctttgccgtcaagagccgtttttgtcgttggggcgttatattcatgtgtatgcccgtaagccttttgctgaagaaacgcacataacaacgacaaactctaataacagcaataaggacaagggatga

SEQ ID NO: 155848 - protein, 277 aa, Photobacterium sp. SKA34
MIKDRNFDDLAQKFAENIYGTAKGQIRQTVVWQDIEQILTSLSSVSPLTVLDAGGGIGQLSQKIASLGHQVTLCDLSSEMLTLAQQEIAKNGLLEQYRLVHCPVQEIGEFIPEPVDLILFHAVMEWLAEPIEVLTGLLHNVKPGGAISVMFYNYNGLLFKNLICGNLTHIEQGMPHRKRFKLQPQQGIKPEEVYQCLTDAGFEIIGKTGVRTFHDYIQTHMVGDYSFEQVLEMEQKLCRQEPFLSLGRYIHVYARKPFAEETHITTTNSNNSNKDKG

SEQ ID NO: 155849 - DNA, 771 bp, Psychromonas sp. CNPT3
  CDS (1)..(771): transl_table=11
ttgatagatcataattttgatggcatagcgcacaaatttttaaaaaacatttatggcaccacaaaagggaagatccgcactgcggttgtgtggcaagcgattttagattgtttggcgcttttacctcaaagaccactgcgtatcttagatgcaggaggtggatgtgggtttttggcacaaaaattagcggcaatgggccatcaggtggtgctctgtgatatatcaaaagtattattagatgaagctaaaaaacaaatgcagggcaaagattttgcaaaaaatgtacacataatacattgtccgattcaacaattatccgagcatgtcgacgctgattttgatttgatcttaaatcatgcggttttagaatggttagagtgtcccaaacaaacgttgcagggattattaacattattaaatgttaatggggtgatgtcgttaatgttttataataaagacgcgcaacgatttcataatttgctttgtgccaattttgattttgttgagcggggaatgttacgaaaaaaagtggtacgtttaacgccgacacacccacttttagaaaaagatgtgcagagttggttaaaagaagtcaatttttatgttttacaaaaaacgggggtgcgtattattcatgattatttaaaagatcctacgcaaagcgtgcataaatacgcacaattacttgccatggagcaaaaatataatcaacaagagccttatgcttcactcgggcgttatactcatttaatgattaaggcaacacagtga

SEQ ID NO: 155850 - protein, 256 aa, Psychromonas sp. CNPT3
MIDHNFDGIAHKFLKNIYGTTKGKIRTAVVWQAILDCLALLPQRPLRILDAGGGCGFLAQKLAAMGHQVVLCDISKVLLDEAKKQMQGKDFAKNVHIIHCPIQQLSEHVDADFDLILNHAVLEWLECPKQTLQGLLTLLNVNGVMSLMFYNKDAQRFHNLLCANFDFVERGMLRKKVVRLTPTHPLLEKDVQSWLKEVNFYVLQKTGVRIIHDYLKDPTQSVHKYAQLLAMEQKYNQQEPYASLGRYTHLMIKATQ

SEQ ID NO: 155851 - DNA, 813 bp, Photobacterium profundum 3TCK
  CDS (1)..(813): transl_table=11
gtgatcgaagatcgaaattttgatgatttagcgcaaaaatttgcgaaaaacatatatggcactgccaaagggcagatccgacaaacagttgtctggcaggatatagagcagattctatctgggttcgacgatgatattccgctgcgtgttttagacgctggtgggggtatcggacaattgtcacaaaaagttgcagagttaggtcatcatgtcactttatgtgatctttctggtgaaatgctgacactagccgagcaggaaattgctaaaaatggacttcttaagcaatatcgcttagttcatagtcctgttcagcatattggtgaccatcttgatgaacctgtcgatttggtgctttttcatgcagtgatggagtggctatcagacccaataacagtacttgaccaattattggaacaagtcaaacctggcggtgtcatttcagtgatgttttataactacaatgggttgctatttaaaaacctaatttgtggtaacttgacgcacatagaagaaggtatgcctcatcgtaagcgttttaagctgcaaccgcagcaaggcattaagcctgatgaggtgtatagttgcctgataaacgcgggattaactattttaggtaaaactggcgtgcgcacttttcacgattacatgcaaaatgcgatggttggtgattacagttttgaacaagttcttgagatggagcaaaagctttgtcgtcaggagccttatttgtctttggggcgctatattcacgtttatgcacgtaaacccttgtacgaagaggtgaaagtgaacggcagtaactgtgaataa

SEQ ID NO: 155852 - protein, 270 aa, Photobacterium profundum 3TCK
MIEDRNFDDLAQKFAKNIYGTAKGQIRQTVVWQDIEQILSGFDDDIPLRVLDAGGGIGQLSQKVAELGHHVTLCDLSGEMLTLAEQEIAKNGLLKQYRLVHSPVQHIGDHLDEPVDLVLFHAVMEWLSDPITVLDQLLEQVKPGGVISVMFYNYNGLLFKNLICGNLTHIEEGMPHRKRFKLQPQQGIKPDEVYSCLINAGLTILGKTGVRTFHDYMQNAMVGDYSFEQVLEMEQKLCRQEPYLSLGRYIHVYARKPLYEEVKVNGSNCE

SEQ ID NO: 155853 - DNA, 834 bp, Vibrio angustum S14
  CDS (1)..(834): transl_table=11
gtgatcaaagaccgaaattttgatgatttagcgcaaaagttcgctgaaaacatatatggcacagcaaaagggcaaattcgacaaactgtcgtatggcaagatattgaacaaattcttacctcgcttagcagtgtatcacctcttactgtattagatgcagggggaggtattggacaattgtcacaaaaaattgcatcacttggacatcaagtaacgttatgtgatctttctagcgaaatgttgacattagctcaacaagaaattgctaaaaacggtttgcttgagcaatatcgtttagtgcattgtcctgtacaggaaattggtgagttcatacctgaacctgtcgatttaattttatttcatgcagtaatggaatggttagctgaaccaatcgaggtacttactggtctattagacaatgtgaaacctggcggtgcaatttccgtgatgttttataactacaacggtctactgtttaaaaacttaatttgtggcaacttgactcatattgagcaaggaatgccgcatcgcaagcgctttaaattgcagccgcagcaagggataaaaccagaagatgtttatcagtgcctaaccgatgccgggtttgaaatcatgggtaaaacaggggttcgcaccttccatgattatattcaaactcatatggtaggtgactacagttttgaacaggttcttgagatggagcagaagctttgtcgccaagagccgtttttgtcgttggggcgttatattcatgtgtatgcccgtaagccttttgctgaagaaacgcacataacaacgacaaactctaataacagcaataaggacaagggatga

SEQ ID NO: 155854 - protein, 277 aa, Vibrio angustum S14
MIKDRNFDDLAQKFAENIYGTAKGQIRQTVVWQDIEQILTSLSSVSPLTVLDAGGGIGQLSQKIASLGHQVTLCDLSSEMLTLAQQEIAKNGLLEQYRLVHCPVQEIGEFIPEPVDLILFHAVMEWLAEPIEVLTGLLDNVKPGGAISVMFYNYNGLLFKNLICGNLTHIEQGMPHRKRFKLQPQQGIKPEDVYQCLTDAGFEIMGKTGVRTFHDYIQTHMVGDYSFEQVLEMEQKLCRQEPFLSLGRYIHVYARKPFAEETHITTTNSNNSNKDKG

SEQ ID NO: 155855 - DNA, 837 bp, Vibrio alginolyticus 12G01
  CDS (1)..(837): transl_table=11
ttgtgccagaatagcggcacaatccgttatgataactcagcagaagtgacagaagaccgcaatttcgacgatatcgcccacaaatttgcaaaaaatatttacggctccgataaaggggagatccgccaaatcattgtgtgggaagattttctaaagattctaagtgaattagatgctgaccagcaacccctagaagtgttagacgctggtggtggtttggcacaaatgtcgcaaaagcttgctaagctcggacatcgaatcgctttatgtgatctatcttcggaaatgctgcagttggctaagcaggatattgaaaaaaacggtttgcttgagcagtatcgcctgattcattcgcctgtccaatccatcggtgaacatatggatgtacaggtcgatctggttatgttccacgctgtgatggagtggctggttgatcctaaggccgcacttgaaacagttctagagcaagtaaaaccgggaggcatcgcatcagtcatgttctacaaccaccacggtttagtctataaaaatgtggtttgtggcaacattcctcatattttagacggcatgcctcaccggaaaagatttaaactacagccacagaaaggcctaaaacccgaagaggtctatcaatggatagaagattctggttttagtatttgtggcaaatctggtattcgttccttcagtgattacataggcaatatgcaatacatgggcgattacgagtttgaagatgtgttggcgctagaaaaacaactttgtcgacaagagccatacctctcattaggccgctacatacacgtgtgggctaagaagaacgataaacaggaataa

SEQ ID NO: 155856 - protein, 278 aa, Vibrio alginolyticus 12G01
MCQNSGTIRYDNSAEVTEDRNFDDIAHKFAKNIYGSDKGEIRQIIVWEDFLKILSELDADQQPLEVLDAGGGLAQMSQKLAKLGHRIALCDLSSEMLQLAKQDIEKNGLLEQYRLIHSPVQSIGEHMDVQVDLVMFHAVMEWLVDPKAALETVLEQVKPGGIASVMFYNHHGLVYKNVVCGNIPHILDGMPHRKRFKLQPQKGLKPEEVYQWIEDSGFSICGKSGIRSFSDYIGNMQYMGDYEFEDVLALEKQLCRQEPYLSLGRYIHVWAKKNDKQE

SEQ ID NO: 155857 - DNA, 777 bp, Oceanobacter sp. RED65
  CDS (1)..(777): transl_table=11
atggatcgaaacttcaatggtttatctaatcgctttaaaaaccagatttatggaaccctcaaaggccagatgcgtctggccttattagaaaaagacttgtctccttatattgaacagacacacgcgctcaatattctcgattgcggcgcgggtcaaggtcagttttcgagcatgcttgcccagcatgggcatagtctcgttttgaatgacgtcagtgacgaaatgctagccatggcacaagccaacttggccgaactagcgccagacaatcagactcaccagatgattacagcacccttgcaatcattgaacgaagagctacacacacgagcgctgccaactcaatatgacttagtactcaaccatgcagtattagaatggttacatgaaccctttgctgcgattgaacaacttgctctttgggtcaaatcagatggcatattatcccttatgttttataacctgcatgccattgtctggcgcaacctcatgaatggttcctggcagcgagctcaaaacacacacttccatcatgataaaaataatctgatgccgcaaaacccgctaaacccagctgacgtggtagaaaagatagaatcactaggattcagtattgaactgcatcgaggcattcgctgcgtacatgaccatatgtttgtagaaatgcgaaaaagaaaaacgctagaagagtttgtagagctggaatcggatattggtttaaaagccccataccgagacttggggcgttacgtacacattgttgctagaaaaatctaa

SEQ ID NO: 155858 - protein, 258 aa, Oceanobacter sp. RED65
MDRNFNGLSNRFKNQIYGTLKGQMRLALLEKDLSPYIEQTHALNILDCGAGQGQFSSMLAQHGHSLVLNDVSDEMLAMAQANLAELAPDNQTHQMITAPLQSLNEELHTRALPTQYDLVLNHAVLEWLHEPFAAIEQLALWVKSDGILSLMFYNLHAIVWRNLMNGSWQRAQNTHFHHDKNNLMPQNPLNPADVVEKIESLGFSIELHRGIRCVHDHMFVEMRKRKTLEEFVELESDIGLKAPYRDLGRYVHIVARKI

SEQ ID NO: 155859 - DNA, 783 bp, Vibrio cholerae V52
  CDS (1)..(783): transl_table=11
atgacagaagatcgcaatttcgacgatattgcccacaaatttgcaaaaaatatatacggttctgacaaaggtgagatccgccaagtcattgtttgggaagatttggagcagcttctcagtcaactggacacgcaaaaagttcccttgcacgtgctcgatgcgggtggcggcttggcgcaagtatcgcaaaaaatcgctcgccttgggcatcgagtgacactctgtgatctttcttcggaaatgttgcaattggccgaacaggatattgcaaacaatggcctgcttgagcagtatcgcttcgtccattcaccagtgcagacgattcaagcacaccttgatgcgcccgtggatttggtgctgtttcatgcggtgatggaatggttagcggaacccaaaccagcgttgcaaaatttgctggcgcaagtcagaccgggcggcatggtgtcggtgatgttttacaactatcacggtttggtttacaaaaacgccgtgtgtggcaacattccgcacgtgctagaggatatgccgcaccgcaaacggtttaaattacaaccgcagaaaggcttgctccccgaagaagtctaccaatggatcgaagaatcgggttttgagatctgcgggaaatccggtattcgttgtttcagtgattacatcggaaacatgaaaaacatgggcgaataccagtatgaggatttggtggcactggagcgcaaattctgccgtcaggagccttacctctcattgggccgatacattcacgtatgggctaagaaaaaacaataa

SEQ ID NO: 155860 - protein, 260 aa, Vibrio cholerae V52
MTEDRNFDDIAHKFAKNIYGSDKGEIRQVIVWEDLEQLLSQLDTQKVPLHVLDAGGGLAQVSQKIARLGHRVTLCDLSSEMLQLAEQDIANNGLLEQYRFVHSPVQTIQAHLDAPVDLVLFHAVMEWLAEPKPALQNLLAQVRPGGMVSVMFYNYHGLVYKNAVCGNIPHVLEDMPHRKRFKLQPQKGLLPEEVYQWIEESGFEICGKSGIRCFSDYIGNMKNMGEYQYEDLVALERKFCRQEPYLSLGRYIHVWAKKKQ

SEQ ID NO: 155861 - DNA, 774 bp, Shewanella putrefaciens 200
  CDS (1)..(774): transl_table=11
atgcaagataagaattttgataagctcgcgcacaagtttgcgaaaaatatttatggcaccccaaaaggggaaattcgtgcagccgtactatggagagatctcagctctgcgttagccccatttggcgataaaaaactccgaattttagatgctggcggtggctttggtttctttagccaaaagctggcacgccttggccatgaagtcgtgctttgcgatatctcacaagagatgcttatccaagcccaagcacatattgatgcctctaccgagcctttaaatattgagcttatccatgcccctatccaagcattatcagttgaacagaatggtgttttcgatctcatactgtgccatgccgtagtcgaatggcttaccgatgctcagcctactatggaaggattgctgacgatgctcaaacctaatggtttgttttcactgatgttttataacaaagaagcaatgcgtttccatgccttaatatcaggaaattttgactacgtggccgcagatcttaaagtaaagaaaaaagtgaggctaacacccacacacccgctttatattcaagaggttaagcaatggtttatggattgggaaatgacgttaataagccaatctggggtgagggttatccacgattacttgaaaaagagccaagccgcagattttgattaccaaaaacttctgcagatggaactcgaatattcccagcacgagacgtatatatcacttggcagatatgtccatttcttaggtattagtcgaggaacataa

SEQ ID NO: 155862 - protein, 257 aa, Shewanella putrefaciens 200
MQDKNFDKLAHKFAKNIYGTPKGEIRAAVLWRDLSSALAPFGDKKLRILDAGGGFGFFSQKLARLGHEVVLCDISQEMLIQAQAHIDASTEPLNIELIHAPIQALSVEQNGVFDLILCHAVVEWLTDAQPTMEGLLTMLKPNGLFSLMFYNKEAMRFHALISGNFDYVAADLKVKKKVRLTPTHPLYIQEVKQWFMDWEMTLISQSGVRVIHDYLKKSQAADFDYQKLLQMELEYSQHETYISLGRYVHFLGISRGT

SEQ ID NO: 155863 - DNA, 786 bp, Vibrionales bacterium SWAT-3
  CDS (1)..(786): transl_table=11
gtgactgaagaccgtaatttcgacgatattgcccacaaatttgcaaaaaatatttacggctctgacaaaggagagatccgtcagatcatcgtatgggaagatttagaacaagctttgagcaagtttgaaggttctgcttctccattgcatgtgcttgatgctgggggcggattggcacagatgtcgcaaaaaattgcggcactgggtcataaggtttctttatgtgatctttcttctgagatgcttaagctggctcaagaagggatcaccgaagctgggctgttagagcaatatcagtttatccattcgccggtacaaaaagtggcagagcatctcgacgataaagtcgactttgtgatgtttcacgccgttatggagtggctagccgatcctaaagaagcacttgatttgctacttgaacaagtcaaaccgggtggtattgcctcgataatgttttacaaccaccacggattagtcctgaaaaatgtgatttgtggcaacattcctcatgtattgaatgggatgccacatcgaaaacggtttaagctgcaaccacaaaaaggcttgaagccagaagaggtttatcaatggatagaagacgctggtctagaaatctgtggtaaatcaggcattcgctccttcagtgactacataggtaatatggagtacatgggcgattaccaatttgaagatgtattggaactagaaaaacagctatgtcgccaagagccatatctgtcactaggccgttatattcacgtttgggctcaaaaacctgcgcaataa

SEQ ID NO: 155864 - protein, 261 aa, Vibrionales bacterium SWAT-3
MTEDRNFDDIAHKFAKNIYGSDKGEIRQIIVWEDLEQALSKFEGSASPLHVLDAGGGLAQMSQKIAALGHKVSLCDLSSEMLKLAQEGITEAGLLEQYQFIHSPVQKVAEHLDDKVDFVMFHAVMEWLADPKEALDLLLEQVKPGGIASIMFYNHHGLVLKNVICGNIPHVLNGMPHRKRFKLQPQKGLKPEEVYQWIEDAGLEICGKSGIRSFSDYIGNMEYMGDYQFEDVLELEKQLCRQEPYLSLGRYIHVWAQKPAQ

SEQ ID NO: 155865 - DNA, 774 bp, Shewanella baltica OS223
  CDS (1)..(774): transl_table=11
atgcaagataagaattttgacaagctcgcgcaaaaatttgcgaaaaatatttatggtacgcctaaaggcgacattcgtgccgctgtactgtggcgcgatctcgcacctgcgctagcaaaactgggggatagaaaactcagagtattagatgcgggcggcggttttggttactttagccaaaaattagcccgcctcggccacgaagtggtgctgtgcgatatctcagcggagatgttggcgcaagcgcaagtacagatagatgcctcgcctgaaccattagctatccagcttatccatgcgcctattcaagatctgtcagttgagcaacatggctatttcgatatcatattgtgccatgcggtcgtcgaatggttaacggatgctaagcccacgatggcgggcctactcactatgcttaaacccgcgggaatattctctttgatgttttacaacaaagaggctatgcgttttcatgccttagtgtcgggtaatttcgattacgtcgccgctgatttgaaagtgaaaaagaaagtgcggctaacacccacacacccactttatattcaagaggttaaagagtggtttaacgactggcaaatgtcacttatcagccaatctggcgtgcgggtgatccacgactatttaaaaaagagtcaaccagtggatttcgattatcaaaaactgctgcaaatggagctcgagtattcacaacgcgagccctacatttccctcggccgatatgtacactttttagggcaaagccccgcagtttga

SEQ ID NO: 155866 - protein, 257 aa, Shewanella baltica OS223
MQDKNFDKLAQKFAKNIYGTPKGDIRAAVLWRDLAPALAKLGDRKLRVLDAGGGFGYFSQKLARLGHEVVLCDISAEMLAQAQVQIDASPEPLAIQLIHAPIQDLSVEQHGYFDIILCHAVVEWLTDAKPTMAGLLTMLKPAGIFSLMFYNKEAMRFHALVSGNFDYVAADLKVKKKVRLTPTHPLYIQEVKEWFNDWQMSLISQSGVRVIHDYLKKSQPVDFDYQKLLQMELEYSQREPYISLGRYVHFLGQSPAV

SEQ ID NO: 155867 - DNA, 780 bp, Vibrio shilonii AK1
  CDS (1)..(780): transl_table=11
atgcaagaccgaaatttcgacgatatcgcccacaaatttgcaaaaaatatttacggctcagagaagggtgaaatccgccaaactattgtttgggaagacttaacccaagctctcgctgcgctggatgatacaagaaaaaaactagaagttttagatgcaggtggtggattagggcaagtttcgcaacgaattgctgagagaggacacaagatcacattgtgtgacctctcttctgaaatgctcaagttggccaaggcagatgttgaaaaaaacgggctactctcgcaatatcgctggatacatagtccagtacagcgtattgcagaacatatgagtcaaccagtagacctggtgttgtttcatgccgttatggaatggttagctgaacctagacccgcactagaagcggttttgcagcaagtgaaacctggtggtatcgcttctgtcatgttttacaatcatcatggattggtatttaagaacgtcatatgtggcaatattcctcatgtacttgaaggcatgccacatagaaaaagatttaagcttcagccacaaaaagggctgaagccagaggaagtgtatcaatggatagaggatgcgggatttgaaatatgtggtaaatctggcattcgttcattcagtgattacattggcaatatgcaatacatgggagactacaccgctgaagatgttctaaaaatagaacagcagctgtgtcgccaagaaccctatctctccatgggccgatacatacatgtatgggcgaggaaaaaacaataa

SEQ ID NO: 155868 - protein, 259 aa, Vibrio shilonii AK1
MQDRNFDDIAHKFAKNIYGSEKGEIRQTIVWEDLTQALAALDDTRKKLEVLDAGGGLGQVSQRIAERGHKITLCDLSSEMLKLAKADVEKNGLLSQYRWIHSPVQRIAEHMSQPVDLVLFHAVMEWLAEPRPALEAVLQQVKPGGIASVMFYNHHGLVFKNVICGNIPHVLEGMPHRKRFKLQPQKGLKPEEVYQWIEDAGFEICGKSGIRSFSDYIGNMQYMGDYTAEDVLKIEQQLCRQEPYLSMGRYIHVWARKKQ

SEQ ID NO: 155869 - DNA, 786 bp, Escherichia albertii TW07627
  CDS (1)..(786): transl_table=11
atgcaggatcgcaactttgatgatattgcggaaaagttttcccgtaacatttacggcaccaccaaagggctgcttcgacaggctattctgtggcaagatctcgatcgcgtactggcagatataggtcagcaaaaactgcgtgtgttagatgccggcggtggtgaaggacagaccgcgatcaaaatggctgagtgcggacatcaggtcattttatgcgatctctcggagcagatgattggtcgcgcaaaacaggcggctgaggcaaaaggtgtgagcgacaacatgcaatttatacattgcgccgctcaggacgttgcttcacatttggaaacgcccgttgatctgatattgttccatgcggtgctggaatgggtagccgatccccgtggcgtattacaaacactgtggtcagtgttacgcccgggcggcgtgttgtcgttaatgttctacaatgcgcatggcttgctgatgcacaacatggttgcagggaattttgattacgtgcaggcgggaatgccgaaaaagaaaaaacggacgctttcgccagactatccacgcgatccggcgcaggtttatctgtggctggaagaagctggctggcaaattacaggtaaaacaggcgttcgcgtgtttcatgattatctgcgtgaaaagcaccaacagcgcgattgctacgaagcattacttgaattagaaacgcattattgccgccaggaaccgtatattaacctggggcgttatattcatgtcaccgcgcgcaaaccgcagagcaaggataaagtatga

SEQ ID NO: 155870 - protein, 261 aa, Escherichia albertii TW07627
MQDRNFDDIAEKFSRNIYGTTKGLLRQAILWQDLDRVLADIGQQKLRVLDAGGGEGQTAIKMAECGHQVILCDLSEQMIGRAKQAAEAKGVSDNMQFIHCAAQDVASHLETPVDLILFHAVLEWVADPRGVLQTLWSVLRPGGVLSLMFYNAHGLLMHNMVAGNFDYVQAGMPKKKKRTLSPDYPRDPAQVYLWLEEAGWQITGKTGVRVFHDYLREKHQQRDCYEALLELETHYCRQEPYINLGRYIHVTARKPQSKDKV

SEQ ID NO: 155871 - DNA, 789 bp, Providencia stuartii ATCC 25827
  CDS (1)..(789): transl_table=11
atggtagaccgcaactttgatgatattgctgataaatttgcaaaaaatatctatggcacgacaaaaggtaaaatacgcgaagcggttgtttggcaagatctaacccaattgattttatctcagtttaatgggcaaacattgcgtatcttagatgcaggcggtggcgaaggtcacttttcgcgcaaactggcggcaatgggacatcaggtcatactttgcgatttatccgaagaaatgcttgaacgcgctaatgaacttgccgaagaacaagggattagcgaaaatatgcgttttattcattgtgccgttcaagatattcgccaacatattgaaggtacggttgatttagtgctatttcatgcggtacttgaatggattagtgaacagaaatatgcaattgaacagttggtagatataattaggccagaaggcgtattttctgtcatgttctataatgcaaatggtttagtaatgcgaaacgcgattttaggtaattttcatcttgctacaccgcatatccaacgtcgacgtaaacgttcattatcgccacaaaatccattactaccacaacaagtcgatgaatggttgtctgattgcaaaatggagattattggcaaaagtggtgtcagagtctttcatgactacctgcaaagtcggcagttacagcaaaaagattttccggcgcttttggctttagaacaacaatattgtcgtcaggaaccctacatcagcatggggcgttatattcatgtcatggcacgaaaaccaataataaaggacgatttatga

SEQ ID NO: 155872 - protein, 262 aa, Providencia stuartii ATCC 25827
MVDRNFDDIADKFAKNIYGTTKGKIREAVVWQDLTQLILSQFNGQTLRILDAGGGEGHFSRKLAAMGHQVILCDLSEEMLERANELAEEQGISENMRFIHCAVQDIRQHIEGTVDLVLFHAVLEWISEQKYAIEQLVDIIRPEGVFSVMFYNANGLVMRNAILGNFHLATPHIQRRRKRSLSPQNPLLPQQVDEWLSDCKMEIIGKSGVRVFHDYLQSRQLQQKDFPALLALEQQYCRQEPYISMGRYIHVMARKPIIKDDL

SEQ ID NO: 155873 - DNA, 786 bp, Escherichia coli B7A
  CDS (1)..(786): transl_table=11
atgcaggatcgcaattttgatgatattgcggaaaagttttcccgtaacatttacggcaccaccaaagggcagcttcgacaggctattctgtggcaggatctcgatcacgtgctggcggaaatgggcccgcaaaaactgcgtgtgctggatgctggcggtggtgaagggcagaccgcaatcaaaatggccgagcgtgggcatcaggtcattttatgcgatctttctgcgcagatgatcgaccgcgcaaaacaggcggcagaagcaaaaggtgtgagcgacaacatgcaatttatacattgcgccgctcaggatgttgcttcgcatttggaaacgcccgttgatctgatattgttccatgcggtgctcgagtgggtggccgatccccgcagtgtattgcagaccctgtggtcagtgttgcgtccaggcggagtgttgtcgttaatgttctacaatgcgcatggtttgttgatgcataacatggtcgccgggaattttgattacgtgcaggcgggaatgccgaaaaagaaaaaacggacgctttcgccagattatccacgcgacccggcgcaggtttatctgtggctggaagaagctggttggcaaattatgggtaagacaggcgttcgcgtgtttcatgattatctgcgcgagaagcaccagcagcgcgactgctatgaagcattacttgaattagaaacgcgttattgccgtcaggaaccgtatattaccctggggcgttatattcatgtcaccgcgcgcaaaccgcagagcaaggataaagtatga

SEQ ID NO: 155874 - protein, 261 aa, Escherichia coli B7A
MQDRNFDDIAEKFSRNIYGTTKGQLRQAILWQDLDHVLAEMGPQKLRVLDAGGGEGQTAIKMAERGHQVILCDLSAQMIDRAKQAAEAKGVSDNMQFIHCAAQDVASHLETPVDLILFHAVLEWVADPRSVLQTLWSVLRPGGVLSLMFYNAHGLLMHNMVAGNFDYVQAGMPKKKKRTLSPDYPRDPAQVYLWLEEAGWQIMGKTGVRVFHDYLREKHQQRDCYEALLELETRYCRQEPYITLGRYIHVTARKPQSKDKV

SEQ ID NO: 155875 - DNA, 786 bp, Shigella dysenteriae 1012
  CDS (1)..(786): transl_table=11
atgcaggatcgcaattttgatgatattgcggaaaagttttcccgtaacatttacggcaccaccaaagggcagcttcgacaggctattctgtggcaggatctcgatcgcgtgctggcggaaatgggcccgcaaaaactgcgtgtgctggatgctggcggtggtgaagggcagaccgcaatcaaaatggccgagcgcgggcatcaggtcattttatgcgatctttctgcgcagatgatcgaccgcgcaaaacaggcggcagaagaaaaaggtgtgagcgacaacatgcaatttatacattgcgccgctcaggatgttgcttcgcatttggaaacgcccgttgatctgatattgttccatgcggtgctcgagtgggtggccgatccccgcagcgtattacagaccctgtggttagtgttgcgtccaggcggtgtgttgtcgttaatgttctacaatgcgcacggcttgctgatgcataacatggtcgccgggaattttgattacgtgcaggcgggaatgccgaaaaagaaaaaacggacgctttcgccagattatccacgcgacccggcgcaggtttatctgtggctggaagaagctggttggcaaattatgggtaagacaggcgttcgcgtgtttcatgattatctgcgcgagaagcaccagcagcgcgactgctatgaagcattacttgaattagaaacgcgttattgccgtcaggaaccgtatattaccctggggcgttatattcatgtcaccgcgcgcaaaccgcagagcaaggataaagtatga

SEQ ID NO: 155876 - protein, 261 aa, Shigella dysenteriae 1012
MQDRNFDDIAEKFSRNIYGTTKGQLRQAILWQDLDRVLAEMGPQKLRVLDAGGGEGQTAIKMAERGHQVILCDLSAQMIDRAKQAAEEKGVSDNMQFIHCAAQDVASHLETPVDLILFHAVLEWVADPRSVLQTLWLVLRPGGVLSLMFYNAHGLLMHNMVAGNFDYVQAGMPKKKKRTLSPDYPRDPAQVYLWLEEAGWQIMGKTGVRVFHDYLREKHQQRDCYEALLELETRYCRQEPYITLGRYIHVTARKPQSKDKV

SEQ ID NO: 155877 - DNA, 780 bp, Enterobacter cancerogenus ATCC 35316
  CDS (1)..(780): transl_table=11
atgcgggatcgcaattttgatgacatcgcggaaaagttttcgcgcaacatttatggcacgactaaaggccagcttcgtcagacgatcctctggcaggatctcgacaagcttcttgccgactatccgggccagagattgcgtgtgcttgatgcgggcggtggcgaaggccagactgccatcctgatggcacagcggggtcatcacgtcaccttgtgcgatctctctgctgaaatggtggcgcgtgcccggcaggcggcagacgagaaaggtgtgagcgacaacatgcattttatacattgcgccgctcaggacattgcgcagcatttggaaacgcaggttgatctgatattgtttcatgctgtgctggaatgggtggccgatccgcaggcggtgctaaaaacgctgtggtcgatgttgcgcccgggcggggcgttatcgctgatgttctacaacgcaaacggcttgttaatgcgaaacgtgctggtgggcaatttcggctacgttcagcagggcatgtataaaaagaaacggcgcacgctgtcgccggatttcccgcgtgaaccgcagcaggtctatggctggctggaggagatcggctgggagatcaccggtaaaacgggcgtgagggtgtttcatgactatctgcgtgataaacaaaaacagcatgactgcttagacgccttaacagaaattgaaacgcggtactgccgccaggagccttatttaagccttggccgctatatccacgtcaccgcgcgcaagccgcagatgcaaggataa

SEQ ID NO: 155878 - protein, 259 aa, Enterobacter cancerogenus ATCC 35316
MRDRNFDDIAEKFSRNIYGTTKGQLRQTILWQDLDKLLADYPGQRLRVLDAGGGEGQTAILMAQRGHHVTLCDLSAEMVARARQAADEKGVSDNMHFIHCAAQDIAQHLETQVDLILFHAVLEWVADPQAVLKTLWSMLRPGGALSLMFYNANGLLMRNVLVGNFGYVQQGMYKKKRRTLSPDFPREPQQVYGWLEEIGWEITGKTGVRVFHDYLRDKQKQHDCLDALTEIETRYCRQEPYLSLGRYIHVTARKPQMQG

SEQ ID NO: 155879 - DNA, 789 bp, Providencia rustigianii DSM 4541
  CDS (1)..(789): transl_table=11
atggcagaccgcaactttgatgatattgtcgataaatttgcaaaaaatatttatggaacgacaaaagggaaaatccgtgaagcggtggtttggcaagatattagccagttacttgaaactcattttcaagggcaacgcttacgtatattagatgcgggtggtggtgaagggcatttttctcgaaaacttgctgcaatgggtcatcaagttattctttgcgatttatccgaagaaatgctggaacgggcatcggtacttgctgatgagcaaggaattagcgagaatatcagcttcattcattgtgccgtacaagatattgctcaacatctcgataaacccgtcgattttgtactttttcacgcggttcttgaatggattagcgatcaaaaatatgcattagagcaactggcagatataatcagaccagagggcatattttctgtcatgttctataatgcaaatggcttggtgatgcgcaatgcaattttaggtaatttccatcttgcaactccccatattcaacgtcgccgcaaacgctcgttgtcgccacaaaacccacttttccctgtgcaggttgatgagtggctaatcggctgtggtatggacattttaggcaaaagtggtgttcgagtgtttcatgactatttgcaaagtagacaattacaacaaaaagattttccagcgttattagcgctagaacaacaatattgtcgtgaagaaccctatatcagcatgggacgatatattcatgtcatggcacgcaaacaaacacaaaaggacgatttatga

SEQ ID NO: 155880 - protein, 262 aa, Providencia rustigianii DSM 4541
MADRNFDDIVDKFAKNIYGTTKGKIREAVVWQDISQLLETHFQGQRLRILDAGGGEGHFSRKLAAMGHQVILCDLSEEMLERASVLADEQGISENISFIHCAVQDIAQHLDKPVDFVLFHAVLEWISDQKYALEQLADIIRPEGIFSVMFYNANGLVMRNAILGNFHLATPHIQRRRKRSLSPQNPLFPVQVDEWLIGCGMDILGKSGVRVFHDYLQSRQLQQKDFPALLALEQQYCREEPYISMGRYIHVMARKQTQKDDL

SEQ ID NO: 155881 - DNA, 789 bp, Providencia alcalifaciens DSM 30120
  CDS (1)..(789): transl_table=11
atggcagaccgcaactttgatgatattgtcgataaatttgcaaaaaatatttatggcacgacaaaaggaaaaattcgtgaagcggtggtttggcaagatcttaaccagttactggaaacgcattttcaaggtcgttcattacgtatattagatgcgggtgggggcgaaggtcacttttccagaaaattagcggcgatggggcatcaggttattctttgcgatttatccgaagaaatgttagaacgggcatcggtgcttgctgatgagcaaggaattagcgagaatatcagcttcattcattgcgccgtacaagacattgctcaacaccttgatgaacctgttgattttgttttattccacgcagtacttgaatggattagcgatcaaaaatatgcattagagcaactggcggatataatcagaccagaaggcatattttctgtcatgttctataatgcaaatggcttggtgatgcgtaatgcaattttaggtaattttcatctcgcaactcctcacattcaacgtcgccgtaaacgctcgttatcgccacaaaatccgcttttccctcaacaggttgatgagtggctcattggttgcgggatggacattctaggtaaaagtggcgtcagagtgttccatgattatttgcaaagtagacaattacaacaaaaagattttccagcgttattggcgcttgaacaacaatattgtcgtgaagaaccctatatcagtatgggacgatatatacatgtcatggcacgcaaacaaacccaaaaggacgatttatga

SEQ ID NO: 155882 - protein, 262 aa, Providencia alcalifaciens DSM 30120
MADRNFDDIVDKFAKNIYGTTKGKIREAVVWQDLNQLLETHFQGRSLRILDAGGGEGHFSRKLAAMGHQVILCDLSEEMLERASVLADEQGISENISFIHCAVQDIAQHLDEPVDFVLFHAVLEWISDQKYALEQLADIIRPEGIFSVMFYNANGLVMRNAILGNFHLATPHIQRRRKRSLSPQNPLFPQQVDEWLIGCGMDILGKSGVRVFHDYLQSRQLQQKDFPALLALEQQYCREEPYISMGRYIHVMARKQTQKDDL

SEQ ID NO: 155883 - DNA, 25 bp, Artificial sequence
  primer
atgcaggatcgcaattttgatgata

SEQ ID NO: 155884 - DNA, 26 bp, Artificial sequence
  primer
ttatactttatccttgctctgcggtt

SEQ ID NO: 155885 - protein, 271 aa, Artificial sequence
  consensus sequence
  Variant (3)..(3): Xaa in position 3 is any amino acid
  Variant (4)..(8): Xaa in position 4 to 8 is any or no amino acid
  Variant (11)..(12): Xaa in position 11 to 12 is any amino acid
  Variant (14)..(15): Xaa in position 14 to 15 is any amino acid
  Variant (17)..(19): Xaa in position 17 to 19 is any amino acid
  Variant (23)..(24): Xaa in position 23 to 24 is any amino acid
  Variant (27)..(28): Xaa in position 27 to 28 is any amino acid
  Variant (30)..(35): Xaa in position 30 to 35 is any amino acid
  Variant (37)..(39): Xaa in position 37 to 39 is any amino acid
  Variant (40)..(40): Xaa in position 40 is any or no amino acid
  Variant (42)..(45): Xaa in position 42 to 45 is any amino acid
  Variant (46)..(54): Xaa in position 46 to 54 is any or no amino acid
  Variant (56)..(57): Xaa in position 56 to 57 is any amino acid
  Variant (60)..(60): Xaa in position 60 is any amino acid
  Variant (62)..(62): Xaa in position 62 is any amino acid
  Variant (64)..(64): Xaa in position 64 is any amino acid
  Variant (66)..(71): Xaa in position 66 to 71 is any amino acid
  Variant (73)..(74): Xaa in position 73 to 74 is any amino acid
  Variant (77)..(77): Xaa in position 77 is any amino acid
  Variant (79)..(79): Xaa in position 79 is any amino acid
  Variant (81)..(81): Xaa in position 81 is any amino acid
  Variant (83)..(83): Xaa in position 83 is any amino acid
  Variant (85)..(86): Xaa in position 85 to 86 is any amino acid
  Variant (88)..(90): Xaa in position 88 to 90 is any amino acid
  Variant (92)..(105): Xaa in position 92 to 105 is any amino acid
  Variant (106)..(116): Xaa in position 106 to 116 is any or no amino acid
  Variant (118)..(126): Xaa in position 118 to 126 is any amino acid
  Variant (127)..(132): Xaa in position 127 to 132 is any or no amino acid
  Variant (135)..(135): Xaa in position 135 is any amino acid
  Variant (137)..(137): Xaa in position 137 is any amino acid
  Variant (141)..(141): Xaa in position 141 is any amino acid
  Variant (144)..(153): Xaa in position 144 to 153 is any amino acid
  Variant (155)..(159): Xaa in position 155 to 159 is any amino acid
  Variant (161)..(161): Xaa in position 161 is any amino acid
  Variant (163)..(164): Xaa in position 163 to 164 is any amino acid
  Variant (166)..(167): Xaa in position 166 to 167 is any amino acid
  Variant (171)..(177): Xaa in position 171 to 177 is any amino acid
  Variant (179)..(181): Xaa in position 179 to 181 is any amino acid
  Variant (184)..(197): Xaa in position 184 to 197 is any amino acid
  Variant (198)..(200): Xaa in position 198 to 200 is any or no amino acid
  Variant (202)..(202): Xaa in position 202 is any amino acid
  Variant (204)..(205): Xaa in position 204 to 205 is any amino acid
  Variant (207)..(208): Xaa in position 207 to 208 is any amino acid
  Variant (210)..(211): Xaa in position 210 to 211 is any amino acid
  Variant (213)..(225): Xaa in position 213 to 225 is any amino acid
  Variant (226)..(227): Xaa in position 226 to 227 is any or no amino acid
  Variant (229)..(229): Xaa in position 229 is any amino acid
  Variant (231)..(231): Xaa in position 231 is any amino acid
  Variant (236)..(251): Xaa in position 236 to 251 is any amino acid
  Variant (252)..(253): Xaa in position 252 to 253 is any or no amino acid
  Variant (255)..(261): Xaa in position 255 to 261 is any amino acid
  Variant (263)..(265): Xaa in position 263 to 265 is any amino acid
  Variant (270)..(270): Xaa in position 270 is any amino acid
DRXXXXXXFDXXAXXFXXXIYGXXKGXXRXXXXXXDXXXXLXXXXXXXXXXXXXLXXLDXGXGXGXXXXXXAXXGHXVXLXDXSXXMXXXAXXXXXXXXXXXXXXXXXXXXXXXXXQXXXXXXXXXXXXXXXDLXLXHAVXEWXXXXXXXXXXLXXXXXPXGXXSXXFYNXXXXXXXNXXXGNXXXXXXXXXXXXXXXXXLXPXXPXXPXXVXXXXXXXXXXXXXXXGXRXFHDYXXXXXXXXXXXXXXXXXXEXXXXXXXPXXXLGRYXH

SEQ ID NO: 155886 - protein, 51 aa, Artificial sequence
  protein pattern
  Variant (2)..(2): Xaa in position 2 is Phe, Ile, Leu or Val
  Variant (3)..(3): Xaa in position 3 is Ile or Val
  Variant (4)..(4): Xaa in position 4 is Ile, Leu or Met
  Variant (5)..(5): Xaa in position 5 is any amino acid
  Variant (8)..(8): Xaa in position 8 is Leu or Val
  Variant (9)..(9): Xaa in position 9 is any amino acid
  Variant (12)..(12): Xaa in position 12 is Ile, Leu, Met or Val
  Variant (13)..(13): Xaa in position 13 is any amino acid
  Variant (14)..(14): Xaa in position 14 is Asp, Glu or Gln
  Variant (15)..(27): Xaa in position 15 to 27 is any amino acid
  Variant (29)..(29): Xaa in position 29 is any or no amino acid
  Variant (31)..(32): Xaa in position 31 to 32 is any amino acid
  Variant (33)..(33): Xaa in position 33 is any or no amino acid
  Variant (35)..(35): Xaa in position 35 is Ile, Leu or Val
  Variant (36)..(36): Xaa in position 36 is any amino acid
  Variant (38)..(38): Xaa in position 38 is Phe or Tyr
  Variant (40)..(41): Xaa in position 40 to 41 is any amino acid
  Variant (42)..(42): Xaa in position 42 is Ala, Gly or Ser
  Variant (43)..(46): Xaa in position 43 to 46 is any amino acid
  Variant (47)..(47): Xaa in position 47 is Ala, Asn, Ser or Thr
  Variant (48)..(48): Xaa in position 48 is any amino acid
  Variant (49)..(49): Xaa in position 49 is Ile, Leu or Val
  Variant (50)..(50): Xaa in position 50 is any amino acid
DXXXXHAXXEWXXXXXXXXXXXXXXXXPXGXXXSXXFXNXXXXXXXXXXXG

SEQ ID NO: 155887 - protein, 37 aa, Artificial sequence
  protein pattern
  Variant (2)..(3): Xaa in position 2 to 3 is any amino acid
  Variant (6)..(6): Xaa in position 6 is any amino acid
  Variant (7)..(7): Xaa in position 7 is Ile or Leu
  Variant (9)..(9): Xaa in position 9 is any amino acid
  Variant (10)..(10): Xaa in position 10 is Lys or Arg
  Variant (12)..(14): Xaa in position 12 to 14 is any amino acid
  Variant (18)..(18): Xaa in position 18 is Gly, Ser or Thr
  Variant (19)..(19): Xaa in position 19 is any amino acid
  Variant (22)..(22): Xaa in position 22 is any amino acid
  Variant (23)..(23): Xaa in position 23 is Ile, Leu or Val
  Variant (25)..(26): Xaa in position 25 to 26 is any amino acid
  Variant (27)..(27): Xaa in position 27 is Ile or Val
  Variant (28)..(28): Xaa in position 28 is Ile, Leu or Val
  Variant (29)..(30): Xaa in position 29 to 30 is any amino acid
  Variant (32)..(35): Xaa in position 32 to 35 is any amino acid
  Variant (36)..(36): Xaa in position 36 is any or no amino acid
DXXFDXXAXXFXXXIYGXXKGXXRXXXXXXDXXXXXL

SEQ ID NO: 155888 - protein, 39 aa, Artificial sequence
  protein pattern
  Variant (2)..(2): Xaa in position 2 is any amino acid
  Variant (3)..(3): Xaa in position 3 is Ile or Val
  Variant (6)..(7): Xaa in position 6 to 7 is any or no amino acid
  Variant (10)..(10): Xaa in position 10 is Gly or Leu
  Variant (12)..(17): Xaa in position 12 to 17 is any amino acid
  Variant (18)..(19): Xaa in position 18 to 19 is any or no amino acid
  Variant (21)..(22): Xaa in position 21 to 22 is any amino acid
  Variant (25)..(25): Xaa in position 25 is any amino acid
  Variant (26)..(26): Xaa in position 26 is Ile, Leu or Val
  Variant (27)..(27): Xaa in position 27 is any amino acid
  Variant (29)..(29): Xaa in position 29 is Ala or Cys
  Variant (30)..(30): Xaa in position 30 is Asp or Glu
  Variant (31)..(31): Xaa in position 31 is Ile, Leu or Pro
  Variant (32)..(32): Xaa in position 32 is Ala or Ser
  Variant (33)..(33): Xaa in position 33 is any amino acid
  Variant (34)..(34): Xaa in position 34 is Glu, Pro or Gln
  Variant (36)..(36): Xaa in position 36 is Ile, Leu or Val
  Variant (37)..(38): Xaa in position 37 to 38 is any amino acid
LXXLDXXAGXGXXXXXXXXAXXGHXXXLXXXXXXMXXXA

SEQ ID NO: 155889 - protein, 20 aa, Artificial sequence
  protein pattern
  Variant (2)..(8): Xaa in position 2 to 8 is any amino acid
  Variant (9)..(9): Xaa in position 9 is any or no amino acid
  Variant (11)..(13): Xaa in position 11 to 13 is any amino acid
  Variant (14)..(14): Xaa in position 14 is any or no amino acid
  Variant (19)..(19): Xaa in position 19 is Ile, Leu or Val
EXXXXXXXXPXXXXLGRYXH

SEQ ID NO: 155890 - DNA, 738 bp, ESCHERICHIA COLI
  CDS (1)..(738): transl_table=11
atgacgttaactgcttcatcttcttcccgcgctgttacgaattctcctgtggttgttgcccttgattatcataatcgtgatgacgcgctggcctttgtcgacaagatcgacccacgcgattgtcgtctgaaggtcggcaaagagatgtttacattgtttgggccacagtttgtgcgcgaacttcaacagcgtggttttgatatctttcttgacctgaaattccacgatatccccaacactgcagcgcacgctgtcgctgctgcagctgacttaggcgtgtggatggtgaatgttcatgcctctggtggggcgcgtatgatgaccgcagcgcgtgaggcactggttccgtttggcaaagatgcaccgcttttgattgctgtgacagtgttgaccagcatggaagccagcgacctggtcgatcttggcatgacactgtcacctgcagattatgcagaacgtctggcggcactgacgcaaaaatgtggccttgatggtgtggtgtgttctgctcaggaagctgtgcgctttaaacaggtattcggtcaggagttcaaactggttacgccgggcattcgtccgcaggggagtgaagctggtgaccagcgccgcattatgacgccagaacaggcgttgtcggctggtgttgattatatggtgattggtcgcccggtaacgcaatcggtagatccagcgcagacgctgaaagcgatcaacgcctctttacagcggagtgcataa

SEQ ID NO: 155891 - protein, 245 aa, ESCHERICHIA COLI
MTLTASSSSRAVTNSPVVVALDYHNRDDALAFVDKIDPRDCRLKVGKEMFTLFGPQFVRELQQRGFDIFLDLKFHDIPNTAAHAVAAAADLGVWMVNVHASGGARMMTAAREALVPFGKDAPLLIAVTVLTSMEASDLVDLGMTLSPADYAERLAALTQKCGLDGVVCSAQEAVRFKQVFGQEFKLVTPGIRPQGSEAGDQRRIMTPEQALSAGVDYMVIGRPVTQSVDPAQTLKAINASLQRSA

SEQ ID NO: 155892 - DNA, 696 bp, Vibrio cholerae O1 biovar El Tor str. N16961
  CDS (1)..(696): transl_table=11
atgaacgacccaaaagtgattgttgcactggactatgacaatctggcggatgcgctcgcgtttgtggacaaaattgacccaagcacatgtcgactcaaagtgggtaaagagatgtttactctatttggtcctgattttgtccgtgagctgcataaacgaggtttttctgtgtttctggatcttaaatttcacgatattccgaatacctgttcaaaagcggtgaaagctgccgctgagcttggggtttggatggtgaatgtgcacgcgagtggtggcgagcgaatgatggcagcatcgcgtgagattctggagccgtatggtaaagagcgcccactgctgattggtgtcactgtattgaccagtatggaatctgccgatttacaaggtattggcatcttgagtgcgccacaagatcatgtgctgcgattagcaacgctcaccaaaaatgctggtcttgatggtgtggtatgctccgcacaagaggcatcactattgaagcaacatttggggcgtgaattcaaattggtgacgccaggaattcgtccagcgggttcagagcaaggcgatcaacgccgtattatgactccagcccaagccattgcctctggttcagattatctcgtgatcggtcgccctatcactcaagccgcacatcctgaagtggttctggaagagataaacagctctttagtttag

SEQ ID NO: 155893 - protein, 231 aa, Vibrio cholerae O1 biovar El Tor str. N16961
MNDPKVIVALDYDNLADALAFVDKIDPSTCRLKVGKEMFTLFGPDFVRELHKRGFSVFLDLKFHDIPNTCSKAVKAAAELGVWMVNVHASGGERMMAASREILEPYGKERPLLIGVTVLTSMESADLQGIGILSAPQDHVLRLATLTKNAGLDGVVCSAQEASLLKQHLGREFKLVTPGIRPAGSEQGDQRRIMTPAQAIASGSDYLVIGRPITQAAHPEVVLEEINSSLV

SEQ ID NO: 155894 - DNA, 702 bp, Pasteurella multocida subsp. multocida str. Pm70
  CDS (1)..(702): transl_table=11
atgacgagtaaaatcattgttgcactagattatgaaaaagaagaagaggcattgtgtttagttgatcaaattgatccgagcttatgtcgtttgaaagtcggtaaagaaatgtttactacattagggacgaaatttgtcaaagcattacatgatcgcaactttgatgtgtttttagatttaaaatttcatgatattccaaatactgtagcaagagcggtgcgttctgcggcagatttaggggtttggatggttgatttacatgccagcggtggtttgcgtatgatggaggaggcgaagaaaattcttgaaccttatggtaaagacgcgcctcttttaattagtgtgacggtattaaccagtatggaagatctagatttattgcaaattggcattaatgcttctccgatggaacaagtaatccgtttagccaatctaacacagcgtgctggattagatggcgtagtttgttctccgcaagaagtggaaattttacgcgctaactgtggtaaagattttaaactgattacgccgggaattcgcccaatcggcagtgattttggtgatcagcgtcgcgtaatgacaccagcgggggcaattcaagcaggttctgactatttagtaattggtcgtccaattacacaagcagataacccagcagaagtgctcaaatcaatcaatgcttctttacctgtgaatagataa

SEQ ID NO: 155895 - protein, 233 aa, Pasteurella multocida subsp. multocida str. Pm70
MTSKIIVALDYEKEEEALCLVDQIDPSLCRLKVGKEMFTTLGTKFVKALHDRNFDVFLDLKFHDIPNTVARAVRSAADLGVWMVDLHASGGLRMMEEAKKILEPYGKDAPLLISVTVLTSMEDLDLLQIGINASPMEQVIRLANLTQRAGLDGVVCSPQEVEILRANCGKDFKLITPGIRPIGSDFGDQRRVMTPAGAIQAGSDYLVIGRPITQADNPAEVLKSINASLPVNR

SEQ ID NO: 155896 - DNA, 699 bp, Pseudomonas aeruginosa PAO1
  CDS (1)..(699): transl_table=11
atgtccgcctgccagtcccccatcatcgtcgccctggatttccccacccgtgaggccgccctggcgctggccgatcagctggacccgaaactgtgccgggtgaaggtcggcaaggaactcttcaccagttgtgccgcgggtatagtcgagaccttgcgtggcaagggcttcgaggtgttcctcgacctgaaattccacgacatcccgaacaccacggcgatggcggtgaaggccgccgccgagatgggcgtgtggatggtcaacgtgcactgctccggcggcctgcgcatgatggccgcctgccgcgagacgctggaggccttcagcgggcccaggccgttgctcatcggcgtgaccgtgctgaccagcatggagcgcgaggacctggcgggcatcggcctcgacatcgagccccaggagcaggtgttgcgcctcgccgccctggcgcagaaggccggcatggacggcctggtctgctcggcccaggaagcgccggcgctgaaggccgcccatccgggcctgcaactggtcacgccgggcatccgcccggccggcagcgcccaggacgaccagcggcgcatcctcaccccgcgccaggccctggacgccggctccgattacctggtgatcggccggccgatcagccaggccgccgacccggccaaggcgctggcggcgatcgtcgccgaactgggctga

SEQ ID NO: 155897 - protein, 232 aa, Pseudomonas aeruginosa PAO1
MSACQSPIIVALDFPTREAALALADQLDPKLCRVKVGKELFTSCAAGIVETLRGKGFEVFLDLKFHDIPNTTAMAVKAAAEMGVWMVNVHCSGGLRMMAACRETLEAFSGPRPLLIGVTVLTSMEREDLAGIGLDIEPQEQVLRLAALAQKAGMDGLVCSAQEAPALKAAHPGLQLVTPGIRPAGSAQDDQRRILTPRQALDAGSDYLVIGRPISQAADPAKALAAIVAELG

SEQ ID NO: 155898 - DNA, 714 bp, Lactococcus lactis subsp. lactis Il1403
  CDS (1)..(714): transl_table=11
atgcaagaaaatagacctgtcattgcccttgatttccctgaattctcagacgtaaaagattttctcgaaaaatttgatccgtcagaacaattgtatattaaactaggaatggaacttttttacacggctggaccccaagtcgtttactatgtaaaatcgctcggccacagtgtattccttgatttaaaactccatgatattccaaacaccgttgaatcctcaatgcatgttttagcacgtttgggagtggatatggttaatgttcacgccgctggtggtgttgaaatgatggtcgcggctaaacgcggtttagaggctggaacgccagttggacggcaaaggccaaaattaattgctgtcacacaattaacctcaacttctgaggaaattatgcaaaatgaccaaaaaattatgactagtcttgaagaatcggttattaattacgcacaaaaaaccgctcaagcaggacttgacggtgtcgtttgttcggcacatgaagttgaaaaaattaaagcagcgacatcgaaagaattcatttgtctcacaccgggaattcgcccagaaggtgcaagtaaaggcgaccaaaaacgagtaatgacacctaaagaagcaagaacaattggttcagattatattgttgtcggccgtccaattacccaagcaaaagatccagtagctagctatcatgcgataaaagcagaatggaatcgataa

SEQ ID NO: 155899 - protein, 237 aa, Lactococcus lactis subsp. lactis Il1403
MQENRPVIALDFPEFSDVKDFLEKFDPSEQLYIKLGMELFYTAGPQVVYYVKSLGHSVFLDLKLHDIPNTVESSMHVLARLGVDMVNVHAAGGVEMMVAAKRGLEAGTPVGRQRPKLIAVTQLTSTSEEIMQNDQKIMTSLEESVINYAQKTAQAGLDGVVCSAHEVEKIKAATSKEFICLTPGIRPEGASKGDQKRVMTPKEARTIGSDYIVVGRPITQAKDPVASYHAIKAEWNR

SEQ ID NO: 155900 - DNA, 741 bp, Neisseria meningitidis MC58
  CDS (1)..(741): transl_table=11
atgaatcctttaatctccgacttccaaactccgcaacaacgcacccccgttatcgtcgcccttgatttttccaacgaaaaagacacgctcggattcgtccgcaaccttgacccgacattgtgtcaaatcaaaatcggcaaagagctgtttaccgcgacgggacgcaatttggcagaaagcttaatcaatcaaggtttcaaacttttcctcgatttgaaataccacgatattccccacaccgtcgcgcaagcctgcaaagtcgctgccgatatgggcgtttggatggtcgatatgcacgcatcgggcggccgccgtatgatggaagccgcagcagaagccgttgccggatacggcacgaagccgctcttaatcggcgtaaccgtgttgaccagcatggaacaaagtgatttggcggaaatcggtttgaacaccgcccctgaagaacaagtcatccgcttggcaaaactggcgcaaagttcgggcttggacggcgtggtctgttccgcccaagaagccgcgccgctgcgccgcgaattgggacaggattttgtcttggtcacgcccggcatccgcttggacgttgccggcaataatgatgaccagcgccgcatcatgacaccggccgaagccttggctgccggttcgacttatttggtaatgggtcgtcctgtaacccaagctgccgatccggtagccgtattgcgcgaagtgaaccgcgtggcaaaccttgaagcaaactga

SEQ ID NO: 155901 - protein, 246 aa, Neisseria meningitidis MC58
MNPLISDFQTPQQRTPVIVALDFSNEKDTLGFVRNLDPTLCQIKIGKELFTATGRNLAESLINQGFKLFLDLKYHDIPHTVAQACKVAADMGVWMVDMHASGGRRMMEAAAEAVAGYGTKPLLIGVTVLTSMEQSDLAEIGLNTAPEEQVIRLAKLAQSSGLDGVVCSAQEAAPLRRELGQDFVLVTPGIRLDVAGNNDDQRRIMTPAEALAAGSTYLVMGRPVTQAADPVAVLREVNRVANLEAN

SEQ ID NO: 155902 - DNA, 738 bp, Escherichia coli O157:H7 EDL933
  CDS (1)..(738): transl_table=11
atgacgttaactgcttcatcttcttcccgcgctgttacgaattctcctgtggttgttgcccttgattatcataatcgtgatgccgcgctggcctttgtcgacaagatcgacccacgcgattgtcgtctgaaagtcggcaaagagatgtttacgctgtttggacctcaatttgtacgcgaacttcaacagcgtggttttgatatcttcctcgacctgaaatttcacgatattcccaacactgcagcgcacgctgtcgctgctgcagctgacttaggcgtgtggatggtgaatgttcacgcctccggtggggcgcgtatgatgaccgcagcgcgtgaggcactggttccgtttggcaaagatgcaccgcttttgattgctgtgacagtattgaccagcatggaagccagcgacctggccgatcttggcgtgacactgtcacctgcagattatgcagaacgtctggcagcactgacgcaaaaatgtggccttgatggtgtggtgtgttctgctcaggaagctgtgcgctttaaacaggtatttggtcaggagttcaaactggttacaccgggcattcgtccgcaggggagtgaagctggtgaccagcgccgcattatgacgccagaacaggcgttggcggctggtgttgattatatggtgattggtcgcccggtaacgcaatcggtagatccagcgcagacgctgaaagcgatcaacgcctctttacagcggagtgcatga

SEQ ID NO: 155903 - protein, 245 aa, Escherichia coli O157:H7 EDL933
MTLTASSSSRAVTNSPVVVALDYHNRDAALAFVDKIDPRDCRLKVGKEMFTLFGPQFVRELQQRGFDIFLDLKFHDIPNTAAHAVAAAADLGVWMVNVHASGGARMMTAAREALVPFGKDAPLLIAVTVLTSMEASDLADLGVTLSPADYAERLAALTQKCGLDGVVCSAQEAVRFKQVFGQEFKLVTPGIRPQGSEAGDQRRIMTPEQALAAGVDYMVIGRPVTQSVDPAQTLKAINASLQRSA

SEQ ID NO: 155904 - DNA, 708 bp, Agrobacterium tumefaciens str. C58
  CDS (1)..(708): transl_table=11
atgaccgcgcgcgaaaaactcatcgtcgggctggatgttccgactgtgcagcaggcagaagacatcgtgtcgaaaatcggcgacgaggtcctgttctacaagatcggttatcagctggtattcgccgggggtcttgaattcgcgcgtgacctcgtccagagcggcaagaaggtctttctcgacatgaagctgctcgatatcgacaacaccgtcgcctcgggcgtcgaaaacatcgcccgcatgggcatgtcgatgctgacgctgcatgcctatcccaaagccatgcgtgctgccgtcaaggcggcggaaggctccggcctctgcctgctgggcgtcaccgtgctgacctccatggatgacagcgatctggtcgaggccggttacgcgtccgacgcgcgttcgctggtgctgcgccgggctgaacaggcacgcgaggccggtatgggcggcattgtctgttcggcggaagaatcgaccgctgtgcgtgaaattctcggccccgaccttgccgtggtcacccccggcattcgccccgccggcgccgatcttggcgatcagaagcgggtgatgacgccctatgacgccatcaaggccggttcgagccatctggttgtcgcccgtcccatcgtcagggcggaagacccgaaagcggcggcccgcgccattctggacgatatgctgcgcgcgagttttccggccaatcagtaa

SEQ ID NO: 155905 - protein, 235 aa, Agrobacterium tumefaciens str. C58
MTAREKLIVGLDVPTVQQAEDIVSKIGDEVLFYKIGYQLVFAGGLEFARDLVQSGKKVFLDMKLLDIDNTVASGVENIARMGMSMLTLHAYPKAMRAAVKAAEGSGLCLLGVTVLTSMDDSDLVEAGYASDARSLVLRRAEQAREAGMGGIVCSAEESTAVREILGPDLAVVTPGIRPAGADLGDQKRVMTPYDAIKAGSSHLVVARPIVRAEDPKAAARAILDDMLRASFPANQ

SEQ ID NO: 155906 - DNA, 738 bp, Yersinia pestis CO92
  CDS (1)..(738): transl_table=11
atgacgtccgcaactaaaactaataacagtggctcaatatcctccccaattgttgttgcgttggattatgccaataaagacgctgcgttagcctttgctgatcaggttagtccacaggattgccggttaaaagtgggcaaagagatgtttacgttgtacggccccgagcttatccgtgacttacatcagcgcggctttgacgtatttcttgatttgaaattccatgacatccctaatactaccgcgcgtgccgtggctgcggcagcagagttgggggtctggatggtcaatgttcatgccagtggcggtgcccgcatgatgtcggcggcgaaagaagccttgttgccttatggtgcacaagcccccttactgattgccgttactgtactgaccagcatggatggcgaagatctgcgggatatcggtattactatcagtccggctgagcaggccgagcggttagcgaaactgacctgggattgcggtttggatggcgtggtgtgctcggctcatgaagcggtgcgtttgaagcaagtttgtggcgaagacttctcgctcgttaccccaggtattcgcccacaaggcagtgaagccggtgaccagcggcggatcatgacacctgaacaggcggtagctgtaggtgttgattacatggtaatcggtcgcccaattacacaatctcctgatccggaaaaaacgctgcgcgaaatattggcatcactgacgaaggtggcataa

SEQ ID NO: 155907 - protein, 245 aa, Yersinia pestis CO92
MTSATKTNNSGSISSPIVVALDYANKDAALAFADQVSPQDCRLKVGKEMFTLYGPELIRDLHQRGFDVFLDLKFHDIPNTTARAVAAAAELGVWMVNVHASGGARMMSAAKEALLPYGAQAPLLIAVTVLTSMDGEDLRDIGITISPAEQAERLAKLTWDCGLDGVVCSAHEAVRLKQVCGEDFSLVTPGIRPQGSEAGDQRRIMTPEQAVAVGVDYMVIGRPITQSPDPEKTLREILASLTKVA

SEQ ID NO: 155908 - DNA, 693 bp, Haemophilus influenzae Rd KW20
  CDS (1)..(693): transl_table=11
atgacaagtaaaattattgtggcattggatttcgagaaagaagcagaggctcttgctttagttgatcaaattgatccaagtttgtgtcgattaaaagtgggtaaagaaatgtttactacacttggtattaattttgtaaaacaattacatcaacgtaattttgatgtttttttggatctgaaatatcacgatattccaaatacggtagcaagagcagttcgttctgctgctgatttaggcgtatggatggtggatttacacgcaagtggtggcttgcgtatgatggaagacgcaaagaaaattcttgaaccttatgggaaagatgcgccattgcttattgctgtgacggtattaaccagtatggaagacttggatttattacaaattgggattaatgcatcgccaatggaacaagttttacgcttagctcatttaacccaacgggcaggtttggatggtgtggtttgctctccgcaagaagttgaaattttacgtaatgcttgtggagaagactttaaattagtgaccccagggattcgtccaataggaactgattttggcgatcaacgacgtgtaatgacacctaccgcagcaattcgtgctggttcagattatttagttattggacgcccaataactcaagcggataatcctgcggaggttctccgttctattaatgtatctattgggtaa

SEQ ID NO: 155909 - protein, 230 aa, Haemophilus influenzae Rd KW20
MTSKIIVALDFEKEAEALALVDQIDPSLCRLKVGKEMFTTLGINFVKQLHQRNFDVFLDLKYHDIPNTVARAVRSAADLGVWMVDLHASGGLRMMEDAKKILEPYGKDAPLLIAVTVLTSMEDLDLLQIGINASPMEQVLRLAHLTQRAGLDGVVCSPQEVEILRNACGEDFKLVTPGIRPIGTDFGDQRRVMTPTAAIRAGSDYLVIGRPITQADNPAEVLRSINVSIG

SEQ ID NO: 155910 - DNA, 696 bp, Synechocystis sp. PCC 6803
  CDS (1)..(696): transl_table=11
atgaccccagaccaagtaattgttgccctagatgtgccggatttacccaaggcgatcgccttagtggatcgtttgccaggggtaggtttttggaaggtggggctggaattatttgtgggggcggggccggtcattttggcggagttaaaagaccggggtaaaaggatttttttggatctgaaattccatgacattcccaatacgatgttgggggcctgcctgtctgccagtcggtacgaagtggatttactcactctccatgccactgcgggaagtcaagctttaaccttagccgcccaagccatggccccattgccccatcctcccaaactgttggccattaccttgctcactagcattggcgatcgccagttacgggaagagttacaacaacccttagccgtggatgattacgtcaacgccatggcccggttggcccgaaatgctggcattgatggagcggtgtgttccccccaggaagtggctaaactgaggcaaacctgcggccctgaatttttactggttacccccggcgtgcggcctctctggtcggccccaggcgatcaacaacgggtcatgattcccgcccaggcgatcgccgctggggccaattatgtggtcattggtcgacccatcactgctgatcctagtcccgaagccgcttgggaaagattatgccaagaccttgctgtttaa

SEQ ID NO: 155911 - protein, 231 aa, Synechocystis sp. PCC 6803
MTPDQVIVALDVPDLPKAIALVDRLPGVGFWKVGLELFVGAGPVILAELKDRGKRIFLDLKFHDIPNTMLGACLSASRYEVDLLTLHATAGSQALTLAAQAMAPLPHPPKLLAITLLTSIGDRQLREELQQPLAVDDYVNAMARLARNAGIDGAVCSPQEVAKLRQTCGPEFLLVTPGVRPLWSAPGDQQRVMIPAQAIAAGANYVVIGRPITADPSPEAAWERLCQDLAV

SEQ ID NO: 155912 - DNA, 738 bp, Salmonella enterica subsp. enterica serovar Typhi str. CT18
  CDS (1)..(738): transl_table=11
atgacgtttactgcttcatcttcttcctgcgctattactgaatcgcctgtcgttgtggcgttggattaccatgaacgcgataaagccctggcgtttgtcgataaaatcgatcctcgcgattgtcgcttaaaagtgggcaaagagatgttcacgctgtttggtccacaactcgttcgggatctccagcaacgtgggtttgatgtctttcttgatctaaaatttcatgatattcccaacaccacggcccgggcagtcgccgcagcggcagacctgggcgtttggatggtaaacgttcacgcgtctggtggggcgagaatgatggccgcagcgcgcgacgcgctggcgccattcagtaaagatgcgccgttgctcattgccgtgaccgtgttgaccagtatgggaaccagcgatctacacgatctgggcgtgacgttgtcaccggcggaacatgcggagcggctggcgcgcctgacgcagcaatgcgggctggatggcgtggtctgttccgctcaggaagctgtcagatttaaacaggcctttggcgctgcatttaagctggtgacgccgggcattcggcccgcaggcagcgaggcaggcgaccagcgacgcattatgacgcccgaacaggcattatccgctggcgtcgactatatggtgattggccgcccggttacgcaatcggtagatccggcgcaaacgctgaaggatattaacgcgtcactgaaacgggaggcataa

SEQ ID NO: 155913 - protein, 245 aa, Salmonella enterica subsp. enterica serovar Typhi str. CT18
MTFTASSSSCAITESPVVVALDYHERDKALAFVDKIDPRDCRLKVGKEMFTLFGPQLVRDLQQRGFDVFLDLKFHDIPNTTARAVAAAADLGVWMVNVHASGGARMMAAARDALAPFSKDAPLLIAVTVLTSMGTSDLHDLGVTLSPAEHAERLARLTQQCGLDGVVCSAQEAVRFKQAFGAAFKLVTPGIRPAGSEAGDQRRIMTPEQALSAGVDYMVIGRPVTQSVDPAQTLKDINASLKREA

SEQ ID NO: 155914 - DNA, 702 bp, Listeria monocytogenes EGD-e
  CDS (1)..(702): transl_table=11
atgaataaaccaattatcgcgctagatttccagacttacgaagaagtagagacctttttagccaaattttcaggagaaacgctatccgtgaaagttggcatggaacttttttatagcaacggtccagtcattgttgaaaaaataaagcaacaaaatcatgaaatcttcttagatttaaaactgcatgacatcccgaacactgtcaaaagtgcgatgattggcttggcaaaactaggcgttgatatggttaatgtacacgcggctggtgggaagaaaatgatggaagctgccaaggaaggtctggaaataggttctccaagtggcaaacgtccaaaaattatcgccgtaacacaactgacaagtacaagtgagacagacatgcaaacggaacaattaataaaaacaagtctgcttgaatccgtcatgcattatagcaatttatcgaaacaagctggtttagacggtgtcgtttgctccgcgctagaagcagaagatattaaacaacaaaatggcgctgattttttacgtgtaacaccaggcatccgactggcaagtgacacggcagacgatcaaattcgtgtcgtaacaccagaaaaagcacgtttgattggctcgtcaaacattgtcgttggtcgttccatcacgcgcgcaaacgacccggtagcagcgtataatcaagttttaaaggagtggaatgcatga

SEQ ID NO: 155915 - protein, 233 aa, Listeria monocytogenes EGD-e
MNKPIIALDFQTYEEVETFLAKFSGETLSVKVGMELFYSNGPVIVEKIKQQNHEIFLDLKLHDIPNTVKSAMIGLAKLGVDMVNVHAAGGKKMMEAAKEGLEIGSPSGKRPKIIAVTQLTSTSETDMQTEQLIKTSLLESVMHYSNLSKQAGLDGVVCSALEAEDIKQQNGADFLRVTPGIRLASDTADDQIRVVTPEKARLIGSSNIVVGRSITRANDPVAAYNQVLKEWNA

SEQ ID NO: 155916 - DNA, 717 bp, Nostoc sp. PCC 7120
  CDS (1)..(717): transl_table=11
atgagtaatgacaaaataattgtggctttggatgtgccagatacggagagtgcgatcgctctcattgataagctagagtcggtgactttttggaaggttgggttggaattgtttactagttccggccccagaattctagaagtactgaaatctagacaaaagcgcatctttctcgatttgaagtttcacgacatccccaatacggtggctggggcttgtcgtgcggcggctggttacggggtggatttgatgacaatccatgctacctctggtagagatgccctgaaggctgcaaaagaggcggtagaggaaggggctgcacaagctggtgtgaaaccgcccaagttaatcgctgtgacggtgttaaccagtatttctgccagacagttggcgttagatttgaaaattccttcagaattgccagaatatgctttagatatggctctaatggcgcaggagatggggttagatggggcagtgtgttcaccccaagaagtggcacatttacgccaaatttgcggggatgatttcgtgttggtttgtccgggggtacgcccaacatgggcagaagcgggagatcaaaagcgatcgctcaccccctcccaagccatccaagcaggggctgattatttagtgattggtcgtccaattactgctgctgctgaacctgagttagcctggaaacgcatttctcaagagttaacaacagtggtatga

SEQ ID NO: 155917 - protein, 238 aa, Nostoc sp. PCC 7120
MSNDKIIVALDVPDTESAIALIDKLESVTFWKVGLELFTSSGPRILEVLKSRQKRIFLDLKFHDIPNTVAGACRAAAGYGVDLMTIHATSGRDALKAAKEAVEEGAAQAGVKPPKLIAVTVLTSISARQLALDLKIPSELPEYALDMALMAQEMGLDGAVCSPQEVAHLRQICGDDFVLVCPGVRPTWAEAGDQKRSLTPSQAIQAGADYLVIGRPITAAAEPELAWKRISQELTTVV

SEQ ID NO: 155918 - DNA, 795 bp, Schizosaccharomyces pombe
  CDS (1)..(795)
atggatgctagagtatttcaaagctattcagctagagctgaggggatgaaaaatcccattgccaaggaattgttggctttgatggaagaaaagcaaagcaacttgtcagtcgcggtcgatttgacgaagaaatccgaaatcttagaattggtagataaaattggaccctatgtctgtgttatcaagacacatattgacgttgtcgaggatttcgaccaggatatggtagaaaaactggtggccttaggtaaaaagcatcgttttcttatctttgaggatcgcaaattcgcagacattggaaataccgtcaagctacaatatgcatctggtgtgtacaaaattgcttcttgggctcatatcacaaattgccatacagtgccaggcgagggtattatacaaggcctcaaagaagttggtttacctttgggacgtggtctcttgcttttggctgaaatgtcttccaaaggctctttggctactggttcctacacagagaaaaccttagaatggtttgagaagcataccgatttttgctttggctttatagctggtcgtcgatttcctaaccttcaaagcgactacataactatgtcccctggtatcggcttggatgttaaaggagacgggctgggacagcaatatcgtactcctgaagaagtgattgtaaactgcggtagcgatatcatcattgttggtcgtggagtctatggagctggtcgtaatcctgttgtcgaagccaagagatatagagaagctggttggaaggcatatcagcaaagactttctcagcattaa

SEQ ID NO: 155919 - protein, 264 aa, Schizosaccharomyces pombe
MDARVFQSYSARAEGMKNPIAKELLALMEEKQSNLSVAVDLTKKSEILELVDKIGPYVCVIKTHIDVVEDFDQDMVEKLVALGKKHRFLIFEDRKFADIGNTVKLQYASGVYKIASWAHITNCHTVPGEGIIQGLKEVGLPLGRGLLLLAEMSSKGSLATGSYTEKTLEWFEKHTDFCFGFIAGRRFPNLQSDYITMSPGIGLDVKGDGLGQQYRTPEEVIVNCGSDIIIVGRGVYGAGRNPVVEAKRYREAGWKAYQQRLSQH

SEQ ID NO: 155920 - DNA, 738 bp, Shigella flexneri 2a str. 301
  CDS (1)..(738): transl_table=11
atgacgttaactgcttcatcttcttcccgcgccgttacgaattctcctgtggttgttgcccttgattatcataattgtgatgacgcgctgtcctttgtcgacaagatcgacccacgcgattgtcgtctgaaggtcggtaaagagatgtttacattgtttgggccacagtttgtgcgcgaacttcaacagcgtggttttgatatctttcttgacctgaaattccacgatatccccaacactgcagcgcacgctgtcgctgctgcagctgacttaggcgtgtggatggtgaatgttcatgcctccggtggggcgcgtatgatgaccgcagcgcgtgaggcactggttccgtttggcaaagatgcaccgcttttgattgctgtgacagtgttgaccagcatggaagccagcgacctggccgatcttggcgtgacactgtcacctgcagattatgcagaacgtctggcagcactgacgcaaaaatgtgaccttgatggtgtggtgtgttctgctcaggaagctgtgcgctttaaacaggtattcggtcaggagttcaaactggttacaccgggcattcgtccgcaggggagtgaagctggtgaccagcgccgcattatgacgccagaacaggcgttggcggctggtgttgattatatggtgattggtcgcccggtaacgcaatcggtagatccagcgcagacactgaaagcgatcaacgcctctttacagcggagtgcatga

SEQ ID NO: 155921 - protein, 245 aa, Shigella flexneri 2a str. 301
MTLTASSSSRAVTNSPVVVALDYHNCDDALSFVDKIDPRDCRLKVGKEMFTLFGPQFVRELQQRGFDIFLDLKFHDIPNTAAHAVAAAADLGVWMVNVHASGGARMMTAAREALVPFGKDAPLLIAVTVLTSMEASDLADLGVTLSPADYAERLAALTQKCDLDGVVCSAQEAVRFKQVFGQEFKLVTPGIRPQGSEAGDQRRIMTPEQALAAGVDYMVIGRPVTQSVDPAQTLKAINASLQRSA

SEQ ID NO: 155922 - DNA, 696 bp, Shewanella oneidensis MR-1
  CDS (1)..(696): transl_table=11
atgacgactaaacctatcctcgtagcgcttgattacgataataaaaaccatgctttacaattgatagatcaactcgatcccaacatgtgtcgcctgaaagtcggcaaagaaatgtttaccctgtttggcccacaactggtgaaagatatccacgaacgtggctttgatcttttccttgacttaaagtttcacgatattcccaatactgttgctaaagcagtcactgctgcagcggaacttggcgtgtggatgacaaacgtccatgccagcggtggcttggccatgatggaagcggcaaaaaaggctttgcagccatacggtaaagaggcgccaatgctgattgccgtgacggtattaacctcaatgagcgatgaagaccttaaattgataggtattgatgtgcctgcatttgagcatgttcagcgtttagctaaattgactaaacaggcagaacttgatggtgttgtctgttcggcccaagaggcgagcatacttaagtcactattaggtcaagactttaaattgattaccccaggcattcgacctgtcggtagtgatgttggtgaccaacaccgcgtgatgacgccgcctgaggcgcttgccgccggtgctgattatttagtgattggtcgtccgatcactaaggcgactgatcctctggctgcgctgcaggccattcaccagtcattggtttag

SEQ ID NO: 155923 - protein, 231 aa, Shewanella oneidensis MR-1
MTTKPILVALDYDNKNHALQLIDQLDPNMCRLKVGKEMFTLFGPQLVKDIHERGFDLFLDLKFHDIPNTVAKAVTAAAELGVWMTNVHASGGLAMMEAAKKALQPYGKEAPMLIAVTVLTSMSDEDLKLIGIDVPAFEHVQRLAKLTKQAELDGVVCSAQEASILKSLLGQDFKLITPGIRPVGSDVGDQHRVMTPPEALAAGADYLVIGRPITKATDPLAALQAIHQSLV

SEQ ID NO: 155924 - DNA, 702 bp, Pseudomonas putida KT2440
  CDS (1)..(702): transl_table=11
atgtccgcctgccagacgcccctgatcgtcgccctggatttccctacccgtgaggccgccctgaagctggctgaccagcttgaccctgcgctgtgccgggtgaaggttggcaaggagctgttcaccagcagcgcttcgggcattgtcgaaaccctgtgtgacaagggcttcgaagtgttcctggacctcaagttccacgacattcccaacaccaccgccatggcggtaaaggctgccgccgagatgggcgtgtggatggtcaacgtgcattgctccgggggcctgcgcatgatggcggcctgccgtgaagagctggccaagcgcagcggcccgcagccgttgctgattggcgtgaccgtgctgaccagcatggagcgtgaagacctggccggcattggcctggatgtcgacccccaagagcaagtgctgcgtttggcggcgctggcggaaaaagcgggtatggacggtttggtgtgctcggcgctcgaggccccggcactgaaggcggcgcacccctcgctgcaattggtgaccccgggcattcgcccggcgggcagcgcgcaggatgaccagcgccgtatcctcaccccacgccaggcactggatgccggttcggactacctggtaatcggccggccgatcagccaggctgcagaccctgcgcaagcgttggcagcggtggtggcggagatccgtgggtaa

SEQ ID NO: 155925 - protein, 233 aa, Pseudomonas putida KT2440
MSACQTPLIVALDFPTREAALKLADQLDPALCRVKVGKELFTSSASGIVETLCDKGFEVFLDLKFHDIPNTTAMAVKAAAEMGVWMVNVHCSGGLRMMAACREELAKRSGPQPLLIGVTVLTSMEREDLAGIGLDVDPQEQVLRLAALAEKAGMDGLVCSALEAPALKAAHPSLQLVTPGIRPAGSAQDDQRRILTPRQALDAGSDYLVIGRPISQAADPAQALAAVVAEIRG

SEQ ID NO: 155926 - DNA, 888 bp, Escherichia coli CFT073
  CDS (1)..(888): transl_table=11
ttgatgttctattgtgcttcggcaccgacggcgcggaaaagcctgccagaggagaaatcgcaactgttaatttttatttccacgggtagaatgctcgccgtttacctgtttcgcgccacttccggtgcccatcatcaagaaggtctggtcatgacgttaactgcttcatcttcttcccgcgctgttacgaattctcctgtagttgttgcccttgattatcataatcgcgatgccgcgatggcctttgtcgacaagatcgacccacgcgattgtcgtctgaaggtcggcaaagagatgtttacattgtttgggccacagtttgtgagcgaacttcaacagcgtggttttgatatctttcttgacctgaaattccacgatattcccaacactgcagcacacgctgtcgctgctgcggctgacttaggcgtgtggatggtgaatgttcatgcctccggtggggcgcgtatgatggccgcagcgcgtgaggcactggttccgtttggcaaagatgcaccgcttttgattgctgtgacagtgttgaccagcatggaagccagcgacctggccgatcttggcgtgacactgtcacctgcagattatgcagaacgtctggcggcactgacgcaaaaatgtggccttgatggtgtggtgtgttctgctcaggaagctgtgcgctttaaacaggtattcggtcaggagttcaaactggttacgccgggcattcgtccgcaggggagtgatgctggtgaccagcgccgcattatgacgccagaacaggcgttgtcggctggtgttgattatatggtgattggtcgcccggtaacgcaatcggtagatccagcgcagacgctgaaagcgatcaacgcctctttacagcggagtgcatga

SEQ ID NO: 155927 - protein, 295 aa, Escherichia coli CFT073
MMFYCASAPTARKSLPEEKSQLLIFISTGRMLAVYLFRATSGAHHQEGLVMTLTASSSSRAVTNSPVVVALDYHNRDAAMAFVDKIDPRDCRLKVGKEMFTLFGPQFVSELQQRGFDIFLDLKFHDIPNTAAHAVAAAADLGVWMVNVHASGGARMMAAAREALVPFGKDAPLLIAVTVLTSMEASDLADLGVTLSPADYAERLAALTQKCGLDGVVCSAQEAVRFKQVFGQEFKLVTPGIRPQGSDAGDQRRIMTPEQALSAGVDYMVIGRPVTQSVDPAQTLKAINASLQRSA

SEQ ID NO: 155928 - DNA, 699 bp, Vibrio vulnificus CMCP6
  CDS (1)..(699): transl_table=11
atgatcgaccaaaaagttattgtcgcactggattacgataatcaagccgatgcactggccttcgtagatagaattgatcctgcgtcatgtcgcctaaaagtaggcaaggaaatgtttactctatttggtcctgatttcgtacgtgaacttcacaaacgtggtttttctgtatttctagatctgaagtttcacgatatcccaaatacatgctcaaaagccgttcgagcagcagctgagttgggtgtctggatggtgaatgtacatgcaagtggtggtgaacgcatgatgacagcatctcgtgagattcttgaaccttatggtaaagatcgcccgttactgattggtgtgaccgtactcaccagcatggagcaaagcgacctagcaggcattggtttggacgttgcaccacaagaacacgtgattcgcttagctacgttgacgaagaattctggtttggatggtgttgtgtgttctgctcaagaatcctctctgctgaagaatgagctgggcaaagagtttaaattggttacgccaggtattcgcccgctcggctcagaacaaggagatcaacgtcgtatcatgacaccacttgaagcggtacaagcaggttctgattaccttgttatcggacggccaattacgcaggcagtagatcctgcggcagtcttgcaagctataaatacaagcctaaccaaatag

SEQ ID NO: 155929 - protein, 232 aa, Vibrio vulnificus CMCP6
MIDQKVIVALDYDNQADALAFVDRIDPASCRLKVGKEMFTLFGPDFVRELHKRGFSVFLDLKFHDIPNTCSKAVRAAAELGVWMVNVHASGGERMMTASREILEPYGKDRPLLIGVTVLTSMEQSDLAGIGLDVAPQEHVIRLATLTKNSGLDGVVCSAQESSLLKNELGKEFKLVTPGIRPLGSEQGDQRRIMTPLEAVQAGSDYLVIGRPITQAVDPAAVLQAINTSLTK

SEQ ID NO: 155930 - DNA, 702 bp, Vibrio parahaemolyticus RIMD 2210633
  CDS (1)..(702): transl_table=11
atgatcgaccaaaaagttattgtcgcactggattatgataaccaagctgatgcgctagcgtttgtagatagaattgatcctgcgtcatgtcgcctaaaagtcggcaaggaaatgtttacgctatttggtcctgattttgtacgtgaactccacaaacgtggtttttctgtattcctggatttgaaatttcatgatatcccgaatacctgttcaaaagcggtacgcgctgctgctgagttaggtgtatggatggtgaacgttcatgcaagcggtggtgagcgtatgatgacagcatcacgtgagattcttgagccatatggtaaagatcgtccacttctgattggtgtaacggtattgactagcatggaacaaagtgacttggcaggtattggtctgaatgttgaaccgcaagagcaagtgattcgtctagcgacattgactaagaactcaggtctcgatggcgtagtgtgctctgcgcaagaatcttcactacttaaaaatgagctaggtaaagagtttaaactgatcactccaggaattcgtcctgctggttctgatcaaggcgaccaacgtcgtattatgacgccagttgatgctattcaagcgggttctgactaccttgttattggccgtccgatcactcaggcgacggaccctgctgccgtattgaaatctatcaacgacagcttagctagcaagtaa

SEQ ID NO: 155931 - protein, 233 aa, Vibrio parahaemolyticus RIMD 2210633
MIDQKVIVALDYDNQADALAFVDRIDPASCRLKVGKEMFTLFGPDFVRELHKRGFSVFLDLKFHDIPNTCSKAVRAAAELGVWMVNVHASGGERMMTASREILEPYGKDRPLLIGVTVLTSMEQSDLAGIGLNVEPQEQVIRLATLTKNSGLDGVVCSAQESSLLKNELGKEFKLITPGIRPAGSDQGDQRRIMTPVDAIQAGSDYLVIGRPITQATDPAAVLKSINDSLASK

SEQ ID NO: 155932 - DNA, 714 bp, Enterococcus faecalis V583
  CDS (1)..(714): transl_table=11
atgcacgatagaccaattattgcgttagattttcccacgcaaaaagaagtggctgtttttttagaaaaatttcctaaggaagaagccttgtttgttaaagtggggatggaacttttttacgcagaaggaccagcgattgttcgctggcttaaagaacaaggacacgatgttttcttggatttaaaattacatgatattccgaatactgtggaaaaagcgatgacaaatttagcaaaattaggcgttgccattactaatgtccatgcagcagggggcgttcgaatgatgcaagcagctaaggaaggtctaatcaaagggactcagccaggcgctaaggttcctgagttaattgctgtaacccagttgacttctactagtgaagaagagatgcaccatgatcaattaatcaacgttcctttagagacaagtgtcattcattatgctaaatgtgcggaaaaagcgggtctggatggtgtggtttgttcagcattagaagcacgtggtattcaagaagcaaccaagcagacgtttatttgcttaacacctggtattcgtccagcaggaagtgcagtaggtgaccaacaacgggtcgttacgccgcaacatgctcgcgaaattgggtccacatatatcgttgttggccgacctattacccaagcagaaaatccttatgaagcctatcaagaaatcaaaaaagactggagcgaaaagtaa

SEQ ID NO: 155933 - protein, 237 aa, Enterococcus faecalis V583
MHDRPIIALDFPTQKEVAVFLEKFPKEEALFVKVGMELFYAEGPAIVRWLKEQGHDVFLDLKLHDIPNTVEKAMTNLAKLGVAITNVHAAGGVRMMQAAKEGLIKGTQPGAKVPELIAVTQLTSTSEEEMHHDQLINVPLETSVIHYAKCAEKAGLDGVVCSALEARGIQEATKQTFICLTPGIRPAGSAVGDQQRVVTPQHAREIGSTYIVVGRPITQAENPYEAYQEIKKDWSEK

SEQ ID NO: 155934 - DNA, 711 bp, Coxiella burnetii RSA 493
  CDS (1)..(711): transl_table=11
atggaaaaaccagacccaaaagttattgtggccatcgatgctgggacggtggagcaagcccgagcacaaataaacccattaacccctgaattatgtcaccttaaaatcggcagtattctatttacacgttacgggccggcatttgtcgaggaattaatgcagaaagggtatcgcatttttctcgatttgaaattttatgatattccacaaacggtggcaggcgcttgccgagcggtcgcagagcttggcgtgtggatgatgaatattcatatatccggtggacgcacgatgatggaaacggtcgtgaatgcgttgcaatcaattactttaaaggaaaaacctttattaatcggggtcactattttaacaagcctagacggtagtgatttaaaaacattagggatacaagagaaggttcctgatatcgtttgtcgtatggcaacccttgccaaaagcgctgggttggatggggtggtttgttcagctcaagaggcggcattgctgcgtaaacaattcgatagaaattttttgttagttactcctggcatccgtttagaaaccgatgaaaaaggtgatcaaaaacgtgtaatgactccacgagcggctatccaagctggcagtgattatttagtaattggcaggcccatcacgcaatccacagatcctttaaaggcattagaggctattgataaagatattaagacccgttga

SEQ ID NO: 155935 - protein, 236 aa, Coxiella burnetii RSA 493
MEKPDPKVIVAIDAGTVEQARAQINPLTPELCHLKIGSILFTRYGPAFVEELMQKGYRIFLDLKFYDIPQTVAGACRAVAELGVWMMNIHISGGRTMMETVVNALQSITLKEKPLLIGVTILTSLDGSDLKTLGIQEKVPDIVCRMATLAKSAGLDGVVCSAQEAALLRKQFDRNFLLVTPGIRLETDEKGDQKRVMTPRAAIQAGSDYLVIGRPITQSTDPLKALEAIDKDIKTR

SEQ ID NO: 155936 - DNA, 696 bp, Nitrosomonas europaea ATCC 19718
  CDS (1)..(696): transl_table=11
atgaatgacccgcgtatcatcgtcgcactggattttcccgatcagtgtacagcattgaattttgctgccgggctggatagtacgctttgccgggtcaaggtcgggaaagagctgtttactctggcgggtccgcaattggtcgagaaattgatgaaactgggtttcgatgtatttctcgatctgaaattccatgatattcccaatacggttgctgcagcttgcagtgctgcatcaagccttggtgtatggatggtcaatgtacacgcgctgggagggagtaaaatgctgcttgcagcccgacaggccctggatgggaaaagaaccagactcattgccgttaccctgctcaccagcctgaatcagaatgatttgagtgagttgggtatagctgatacaccggaaacaatggtgcagcgactggctttgcttgcccagcgttgtggcctggacggtgtggtttgttcagcgctggaagcggtgagtctgagagaagtgactggtgaggatttttgtctggtcactccgggtatccgatcattcggtgacggtaacgatgatcaggcgaggattgcaacaccggcaatggcaatacgtagtggggccagctatcttgtgatcggcagacccatcacccgatcaccggatccgctcggagcactccgtcgattcaatgacgaggtcgcttcagttttatga

SEQ ID NO: 155937 - protein, 231 aa, Nitrosomonas europaea ATCC 19718
MNDPRIIVALDFPDQCTALNFAAGLDSTLCRVKVGKELFTLAGPQLVEKLMKLGFDVFLDLKFHDIPNTVAAACSAASSLGVWMVNVHALGGSKMLLAARQALDGKRTRLIAVTLLTSLNQNDLSELGIADTPETMVQRLALLAQRCGLDGVVCSALEAVSLREVTGEDFCLVTPGIRSFGDGNDDQARIATPAMAIRSGASYLVIGRPITRSPDPLGALRRFNDEVASVL

SEQ ID NO: 155938 - DNA, 699 bp, Wigglesworthia glossinidia endosymbiont of Glossina brevipalpis
  CDS (1)..(699): transl_table=11
atgaaactatctccaattattgtagctttagattattctaacccaaaaaaagctatatctttttctaaaaagatttccccagatcaatgccaattaaaaattggacatgaattatttattaattcaggattttttttaatcaactttttacaaaaaaatggatttaaaatttttttagatttaaagctttacgacattcctaatacaataaaaaaaacaatattttcgctagcaaaatttggaatatggatggttaatgttcatgctagtggaggatataatatgatgactgctgctaaagatgctttgtcacatataaataatcctccaaaacttattgcagttacagttcttactagcatggaaaaatcagatttaagcaaatcaaaaatttttacaaaaataataaatcatgtaattcatttatctaataacgcttataaatgtggattagatggtattgtatgctccccttgggaagctgaaaaagtaagaaaaaaatttggaaataattttattattgtaactcctggaataaggtttaaaaatacaaattataatgatcaaaaaagagtaatgaatccatacgacgctataaaatctggatctaattatatagtgattggtagacctattactaaatcaagcaacccatatttattattagaaaaaattttatcaaaattaaataatatttag

SEQ ID NO: 155939 - protein, 232 aa, Wigglesworthia glossinidia endosymbiont of Glossina brevipalpis
MKLSPIIVALDYSNPKKAISFSKKISPDQCQLKIGHELFINSGFFLINFLQKNGFKIFLDLKLYDIPNTIKKTIFSLAKFGIWMVNVHASGGYNMMTAAKDALSHINNPPKLIAVTVLTSMEKSDLSKSKIFTKIINHVIHLSNNAYKCGLDGIVCSPWEAEKVRKKFGNNFIIVTPGIRFKNTNYNDQKRVMNPYDAIKSGSNYIVIGRPITKSSNPYLLLEKILSKLNNI

SEQ ID NO: 155940 - DNA, 693 bp, Haemophilus ducreyi 35000HP
  CDS (1)..(693): transl_table=11
atggacaataaaattattgttgccttagattatgaaactgaaaatgaagcattgaattttatagatcaggttgatccgtcactttgtcgcttgaaagtgggtaaagaaatgtttacaacgttaggtgctcactttgttaaacagcttcacgacagaaaatttgatgtttttcttgatttaaaatatcacgatattccaaatactgtggcaagggctgtgcgttcagccgctgatttaggggtatggatggttgatttacatgcgtcaggtggattaacaatgatggaggaagcaaaaaaaattcttgagccttatggtaaggatgcgcctttattaattgcggtgacggtattaacaagtatggaagatttagatttgttacaaattggtattaatgcttctccgatggaacaggtgattcggttatcccaccttgcaaaacgtgcgggactagatggtgtagtctgttctccacaagaggtagaagtgttaagaacgcattgtggtgatgattttaaacttgtgacaccgggtattcgtccagccggttcagattttggtgatcaacgtcgtgtaatgacacccaaacaggctattcaaacgggggctgattttttagttattggtcgtcctattactcaagcacaagaacctttatccattttaaaagccattaatgcttcaattgcataa

SEQ ID NO: 155941 - protein, 230 aa, Haemophilus ducreyi 35000HP
MDNKIIVALDYETENEALNFIDQVDPSLCRLKVGKEMFTTLGAHFVKQLHDRKFDVFLDLKYHDIPNTVARAVRSAADLGVWMVDLHASGGLTMMEEAKKILEPYGKDAPLLIAVTVLTSMEDLDLLQIGINASPMEQVIRLSHLAKRAGLDGVVCSPQEVEVLRTHCGDDFKLVTPGIRPAGSDFGDQRRVMTPKQAIQTGADFLVIGRPITQAQEPLSILKAINASIA

SEQ ID NO: 155942 - DNA, 744 bp, Chromobacterium violaceum ATCC 12472
  CDS (1)..(744): transl_table=11
atgaatcctctgatcgcacagggcgaaagccggacgacgtccccggtggtggtggcgctggatttcgccgacgcggacggcgcgctcgccttcgccagccgcctggatccggcggaatgccggctgaaggtcggcaaggagctgttcacctccagcggccgccacttggtcgaatcgctggccgcgcgcggcttccaggttttcctggacatgaaattccacgacatccccaataccgtggcccaggcctgcaaggccgcggccgagtccggcgtgtggatggtcaacgtccacgcctccggcggccgccggatgatggaggccgcgcgcgaggcgctggccggctacagccagcgcccgctgctgatcgcggtgacggtgttgaccagcatggaggcgtcggacctggccgaggtcggcatcgccgccacgccgcaggagcacgtgctgcgcctggccacgctgacccgcgattgcggcctggacggcgtggtgtgctcggcgcaggaggccgcgatgctgaagctggcgctgggccgcgatttcaagctggtgacgccgggcatccgtctcgccgacagcgccggcgacgaccagcgccgcgtgatgacgccgaccgccgccttggccgccggctcggactatctggtgatcggccggccgatcacccgcgccgcggacccgttggccgcgctgcgcgccatcaatcaagacatttccgtattcctgggtaaacaatcatga

SEQ ID NO: 155943 - protein, 247 aa, Chromobacterium violaceum ATCC 12472
MNPLIAQGESRTTSPVVVALDFADADGALAFASRLDPAECRLKVGKELFTSSGRHLVESLAARGFQVFLDMKFHDIPNTVAQACKAAAESGVWMVNVHASGGRRMMEAAREALAGYSQRPLLIAVTVLTSMEASDLAEVGIAATPQEHVLRLATLTRDCGLDGVVCSAQEAAMLKLALGRDFKLVTPGIRLADSAGDDQRRVMTPTAALAAGSDYLVIGRPITRAADPLAALRAINQDISVFLGKQS

SEQ ID NO: 155944 - DNA, 714 bp, Gloeobacter violaceus PCC 7421
  CDS (1)..(714): transl_table=11
atgggtggtgccgaacgggtgatcgtggccctcgatctcgcggacgcccaggcggcccgcgccctggtggagcgcgccccggccgtgcgcttctggaaagtcggactggaactattcaccgccgccggtccgggcctgatcgaatggctcaaagcgcgcgggtgccgggtgtttctcgatctcaaatttcacgatattcccaacacggtggccggggcctgccgggcggccacccgcctgggggtggacctgctcaccgtgcatgcgacggggggacaaccgatgctgatggcggcggtctccgcctgcacaggcgaagcggcccgcctcgggagccccgccccggcggtgctggcggtgaccctgctcaccagcctggacgcgcagctgctcgaacagcagctcttggtcaatgtcggggtaagcggctatgtggagcacctcgcggtcctggccgtgtcaagcggtgtgcagggggtggtctgctcgcctctggagacggccctgctgcgcgagcgctgcggaaacgattttctgatcgtcaccccgggcattcgcccgggtgggagcggcgaaggcgaccagcgccgcaccctaacccccggcgaagcgtttgcccggggcgccgactacctggtggtgggccgcccggtgacgaccgcccccgatccccaggtcgcattcaaggccatcgtcgcggaggtcggcggatga

SEQ ID NO: 155945 - protein, 237 aa, Gloeobacter violaceus PCC 7421
MGGAERVIVALDLADAQAARALVERAPAVRFWKVGLELFTAAGPGLIEWLKARGCRVFLDLKFHDIPNTVAGACRAATRLGVDLLTVHATGGQPMLMAAVSACTGEAARLGSPAPAVLAVTLLTSLDAQLLEQQLLVNVGVSGYVEHLAVLAVSSGVQGVVCSPLETALLRERCGNDFLIVTPGIRPGGSGEGDQRRTLTPGEAFARGADYLVVGRPVTTAPDPQVAFKAIVAEVGG

SEQ ID NO: 155946 - DNA, 747 bp, Photorhabdus luminescens subsp. laumondii TTO1
  CDS (1)..(747): transl_table=11
atgacatctcataccttaacatcgttcggtagacagattagctcgcctgtcattgttgctttagattacgacaatcaggatacggcgctggcttttgccgataaaattgatccacaggattgccgtctgaaagtaggtaaagagatgtttaccttacatggtccgcagtttgttaagttgctgcaccaacgtggttttgaagtatttctagatttgaaattccatgatattcctaataccaccgccagagcggtagctgccgctgctgagatgggggtttggatggtaaacgtacatgctagtggcggcaccagaatgatgacagcggcgaaagaggcgctgctgccttatggtcatgatgctccattgttaattgctgtcacggtattaaccagcatggaacaatcggatctgcaaggtattgggattgatatgacaccagcgcaacaggctgaaaggttggcaaaactgactcaggcatgtgggctggatggtgtggtttgttctgcacatgaagctcagcaactgaaaaaggtttgtggtcagcattttcaattagttactcccggaattcgcccgacgggcagtgatgtgggtgatcagcgccgtatcatgacgccagaacaggcggtattggctggcgttgattatatggtcattggccgtccgattacccgtgccgccgatcctgcggccgcattgcgtcaaattaatcaatctattgcgggagtgattaatgcaagataa

SEQ ID NO: 155947 - protein, 248 aa, Photorhabdus luminescens subsp. laumondii TTO1
MTSHTLTSFGRQISSPVIVALDYDNQDTALAFADKIDPQDCRLKVGKEMFTLHGPQFVKLLHQRGFEVFLDLKFHDIPNTTARAVAAAAEMGVWMVNVHASGGTRMMTAAKEALLPYGHDAPLLIAVTVLTSMEQSDLQGIGIDMTPAQQAERLAKLTQACGLDGVVCSAHEAQQLKKVCGQHFQLVTPGIRPTGSDVGDQRRIMTPEQAVLAGVDYMVIGRPITRAADPAAALRQINQSIAGVINAR

SEQ ID NO: 155948 - DNA, 714 bp, Rhodopseudomonas palustris CGA009
  CDS (1)..(714): transl_table=11
atggcgccagtcgacatccctgaccgcgaccggctgatcgtcgcgctcgatttgcctgatctccgtgtcgccgaagcgatggtcgaccggctcggcgacagcgtcggtttctacaagatcggctatcagctcgcttatgcgggcggcctgccgctcgcccgtgctctggtcggcgccggcaagaaggtgttcgtcgatcttaagctgcacgacatcggcaacaccgtcgcgcgcggcgtcgaaagcctgagccatctcggcgcatccttcctcaccgtccatgcctacccgcagaccatgaaggccgcggtcgaggcccgtggctcctcgaaggtgaagatcctcgctgtcaccgtgctgacctcttatgacgaccgcgatctggcggacgccggctatcggttcggcgtgcgcgacctggtcgaagcgcgcgcccgccaggcgcaggcgatcggtgtcgacggcctggtctgttcgccagaggaagccgcgcatctgcgcagcattgtcggacccgaaatggatctagtgacgccgggcatccgtcccgccggtgcggccgcgggcgatcaaaagcggatcatgacgcccgctaaggcgatcgcggccggtgccagctatctggtggtcggtcggcccgtgctggacgcgccagatcccaaggccgctgcggatgcgatcgttgccgagatcgctgccgcacgcggatcataa

SEQ ID NO: 155949 - protein, 237 aa, Rhodopseudomonas palustris CGA009
MAPVDIPDRDRLIVALDLPDLRVAEAMVDRLGDSVGFYKIGYQLAYAGGLPLARALVGAGKKVFVDLKLHDIGNTVARGVESLSHLGASFLTVHAYPQTMKAAVEARGSSKVKILAVTVLTSYDDRDLADAGYRFGVRDLVEARARQAQAIGVDGLVCSPEEAAHLRSIVGPEMDLVTPGIRPAGAAAGDQKRIMTPAKAIAAGASYLVVGRPVLDAPDPKAAADAIVAEIAAARGS

SEQ ID NO: 155950 - DNA, 840 bp, Aspergillus terreus NIH2624
  CDS (1)..(840)
atgtcgtccaagtctcaattgacctacggcactcgcgcccgcacgcacccgaacccgctggtgaagcgcctgttcgaggtggcggaggcgaagaaaacgaacgtgacggtctcggcggacgtgtcgacaacgaaagagctgctggatttggctgaccgcctcggaccgcacattgccgtgatcaagacgcacatcgacatcctctcggactttagcgacgagacgatccgcgggctgaaggcgctcgcggagaagcacaacttcctcatcttcgaagaccgcaagttcatcgacatcggcaacacggtgcagaagcagtaccatggcggcgcgctgcgcatctccgagtgggcgcacatcatcaactgcagcgtgctgcccggcgagggcatcgtggaggctctcgcccagaccgccgcggcgcaggacttcccctacggcccggagcgtggcctgctcatccttgccgagatgacctccaagggatcgctggcgacgggccagtacacgaccgcgtcggtggactacgcgcgcaagtacaagaactttgtcatgggcttcgtgtcgacccgctcgttgggcgaggtgaggtcggatgtgagcgcgccgtcggacgaggaggactttgtggtgtttactacgggcgtgaacctctcgtccaagggggataagctcggccagcagtatcagactcccgagtcggcgattggccgcggagccgacttcatcattgcgggtcgcggcatctatgcggcggctgatccggtggaagctgtccagcggtaccagaaggagggatgggaggcttacttgaagcgggtcgggggtaacggtaactaa

SEQ ID NO: 155951 - protein, 279 aa, Aspergillus terreus NIH2624
MSSKSQLTYGTRARTHPNPLVKRLFEVAEAKKTNVTVSADVSTTKELLDLADRLGPHIAVIKTHIDILSDFSDETIRGLKALAEKHNFLIFEDRKFIDIGNTVQKQYHGGALRISEWAHIINCSVLPGEGIVEALAQTAAAQDFPYGPERGLLILAEMTSKGSLATGQYTTASVDYARKYKNFVMGFVSTRSLGEVRSDVSAPSDEEDFVVFTTGVNLSSKGDKLGQQYQTPESAIGRGADFIIAGRGIYAAADPVEAVQRYQKEGWEAYLKRVGGNGN

SEQ ID NO: 155952 - DNA, 825 bp, Coccidioides immitis RS
  CDS (1)..(825)
atggcctccaaatcacaagtcccgtacgaagaccgtgcgcgcgaccatcccaatccacttgcacgacgattatttcagattgcgaccgagaaacagtcaaatgtcgcggtctcggccgatgtcacaactacaaaggagctccttgacctggctgacagactcggcccctacatggtcgttctaaaaactcacatcgatatcctcgccgacttctccgccgaaaccataaccggactccaatccctttcccagaagcacaacttcctgatctttgaggaccggaaattcgttgatattggcaacacagtgcaaaaacaataccatgggggcgcactccacatttcggaatgggctcatatcgttaatgcaaccgtgcttccgggcccaggtatcatagatgccctggcgcaagttgcttctgcaccagacttcccccatgcttcagacagagggctcctgatcttggcgacgatgacatcaaagggtagtcttgctactggtcagtatactgagttgtcggttgagctggcgcggaagtataagggctttgtcctaggcttcgtggccagcaggtccttggaaggagttgaaacggctggaaaggcggatgatgaggattttgtcctcttcacgacaggtgttaaccttgcttccaagggtgatgcattgggacagcagtatcagacccctgaatcagccattggaggcggtgcggactttattatcagtggacgcgggatctatgcggctcctgacccggttgatgccgctaggcggtatcaaaaagcgggctgggatgcttatttgaaaagagtgggcagataa

SEQ ID NO: 155953 - protein, 274 aa, Coccidioides immitis RS
MASKSQVPYEDRARDHPNPLARRLFQIATEKQSNVAVSADVTTTKELLDLADRLGPYMVVLKTHIDILADFSAETITGLQSLSQKHNFLIFEDRKFVDIGNTVQKQYHGGALHISEWAHIVNATVLPGPGIIDALAQVASAPDFPHASDRGLLILATMTSKGSLATGQYTELSVELARKYKGFVLGFVASRSLEGVETAGKADDEDFVLFTTGVNLASKGDALGQQYQTPESAIGGGADFIISGRGIYAAPDPVDAARRYQKAGWDAYLKRVGR

SEQ ID NO: 155954 - DNA, 837 bp, Neosartorya fischeri NRRL 181
  CDS (1)..(837)
atgtcttccaagtcgcaattgacttatgctgctcgagccagcaagcaccccaatcctttggcaaagaggctctttgagattgccgaagcaaagaagacaaacgttaccgtctctgctgatgtgacgactacccgagaactcctggacctcgctgaccatctcggtccctacatcgccgtcatcaagacacacatcgatatcctcaccgatttcagcgtcgacactatcaatggcctgaatgtgctggctcaaaagcacaactttttgatcttcgaggaccgcaaattcatcgacatcggcaataccgtccagaagcaataccacggcggtgctctgaggatctccgaatgggcccacattatcaactgcagcgttctccccggcgagggcatcgtcgaggctctggcccagaccgcatctgcgcaagacttcccctacggtcctgagagaggactgttgatcctggcagagatgacctccaagggatcgctggctacgggcgaatataccaaggcatcagttgactacgctcgcaaatacaagaacttcgttatgggtttcgtgtcgacgcgggccctgacggaggtgcagtcggatgtgtcttcagcctcggaggatgaagatttcgtggtcttcacgacgggtgtgaacctctcttccaaaggagataagcttggacagcaataccagactcctgcatcggccattggacgaggtgccgactttatcatcgccggtcgaggcatctacgctgctcccgacccggttgaggccgcacggcggtaccagaaggaaggttgggaagcttatatggccagagtgggcggcaagtcatga

SEQ ID NO: 155955 - protein, 278 aa, Neosartorya fischeri NRRL 181
MSSKSQLTYAARASKHPNPLAKRLFEIAEAKKTNVTVSADVTTTRELLDLADHLGPYIAVIKTHIDILTDFSVDTINGLNVLAQKHNFLIFEDRKFIDIGNTVQKQYHGGALRISEWAHIINCSVLPGEGIVEALAQTASAQDFPYGPERGLLILAEMTSKGSLATGEYTKASVDYARKYKNFVMGFVSTRALTEVQSDVSSASEDEDFVVFTTGVNLSSKGDKLGQQYQTPASAIGRGADFIIAGRGIYAAPDPVEAARRYQKEGWEAYMARVGGKS

SEQ ID NO: 155956 - DNA, 837 bp, Aspergillus clavatus NRRL 1
  CDS (1)..(837)
atgtcttcgaaatcgcaattgagctatgctgctcgtgctagcaagcatcccaatcccctcgccaagaggcttttcgagattgccgaagccaagcactccaatgtcaccgtctccgctgatgtgacgactaccaaggagctgctggatcttgctgaccgtctcggtccccacattgccgtgatcaagacacacattgatatcctctcggacttcggcgacgacaccatcaacggtctgaccgcgctcgccaagaagcacaacttcctcatcttcgaagaccgcaagttcatcgatatcggcaacaccgtccaaaagcagtaccacggtggtgcgctgcggatttccgagtgggcccatatcatcaattgcagcgtgctccctggcgagggtatcgttgaggctctggcacagaccgcatcggcacaggacttcccctacggccctgagcgcggacttctgatcctggctgagatgacctccaagggatcattggctactggagactatactaaggcgtcggttgactacgcccgcaaatacaagaagtttgttacgggcttcgtgtcgacgcgggccctgaccgaggtgcagacggatgtgacttcggcctcggaagatgaggatttcgtcgtcttcaccacgggcgtgaatctctcttccaagggcgataaacttggacaacaatatcagactcccgaatcggccattggacgaggggctgacttcatcattgcgggacggggaatttatgctgctccagacccggtcgaggcagctcagcggtatcagaaggagggatgggatgcttatatggccagagtgggcggcaagtcataa

SEQ ID NO: 155957 - protein, 278 aa, Aspergillus clavatus NRRL 1
MSSKSQLSYAARASKHPNPLAKRLFEIAEAKHSNVTVSADVTTTKELLDLADRLGPHIAVIKTHIDILSDFGDDTINGLTALAKKHNFLIFEDRKFIDIGNTVQKQYHGGALRISEWAHIINCSVLPGEGIVEALAQTASAQDFPYGPERGLLILAEMTSKGSLATGDYTKASVDYARKYKKFVTGFVSTRALTEVQTDVTSASEDEDFVVFTTGVNLSSKGDKLGQQYQTPESAIGRGADFIIAGRGIYAAPDPVEAAQRYQKEGWDAYMARVGGKS

SEQ ID NO: 155958 - DNA, 843 bp, Aspergillus niger CBS 513.88
  CDS (1)..(843)
atgtcctccaagtcgcgattgacctacactgcccgtgccagcaagcatcccaatgctctggcgaagaggctgttcgagattgccgaggccaagaagaccaatgtgactgtctcggctgacgttaccaccactaaggagctactagatcttgctgaccgtctcggtccctacattgccgtgatcaaaacccacatcgatatcctctctgatttcagcaacgagaccattgagggacttaaggctctcgcgcagaagcacaactttctcatcttcgaggaccgcaagttcattgacatcggcaacacggtccagaagcaataccacggcggtaccctccgtatctcggaatgggcccacatcatcaactgcagcattctccctggtgagggtatcgtcgaggctctcgctcagacggcgtctgcaccggacttcgcctacggccccgaacgcggtctgttgatcttggcagagatgacctctaagggctccttggctaccggccagtacactacttcctcggtcgattatgcccggaaatacaagaacttcgttatgggattcgtgtcgacgcgcgcgttgggtgaggtgcagtcggaagtcagctctccttcggatgaggaggactttgtggtcttcacgactggtgtgaacatttcttccaagggagataagcttggtcagcagtaccagacgcccggatcggctatcggccggggtgctgacttcattatcgcgggtcgcggtatctacgccgcgccggatccggtgcaggctgcgcaacagtatcagaaggaggggtgggaagcctacctggcccgtgtcggcggaaaactaatactataa

SEQ ID NO: 155959 - protein, 280 aa, Aspergillus niger CBS 513.88
MSSKSRLTYTARASKHPNALAKRLFEIAEAKKTNVTVSADVTTTKELLDLADRLGPYIAVIKTHIDILSDFSNETIEGLKALAQKHNFLIFEDRKFIDIGNTVQKQYHGGTLRISEWAHIINCSILPGEGIVEALAQTASAPDFAYGPERGLLILAEMTSKGSLATGQYTTSSVDYARKYKNFVMGFVSTRALGEVQSEVSSPSDEEDFVVFTTGVNISSKGDKLGQQYQTPGSAIGRGADFIIAGRGIYAAPDPVQAAQQYQKEGWEAYLARVGGKLIL

SEQ ID NO: 155960 - DNA, 834 bp, Aspergillus oryzae RIB40
  CDS (1)..(834)
atgtcttccaagtcgcaattgacctacagcgcacgcgctagcaagcaccccaatgcgctcgtaaagaagctcttcgaggttgccgaggccaagaaaaccaatgtcaccgtttccgccgacgtgacaaccaccaaagagctgctggatttggctgaccgactcggtccgtacattgccgtgatcaaaactcacatcgatatcctctccgatttcagcgaagaaaccatcaccggtctgaaggcccttgcagagaagcacaatttcctcatcttcgaagatcgcaagttcatcgatatcggaaacacagtccaaaagcagtaccatggcggcactctgcgtatctctgagtgggcccacatcatcaactgcagtattctgcccggtgagggtatcgtcgaggctctggcccagactgcttcggccgaggacttcccctacggctccgagaggggccttttgatccttgcggagatgacctccaagggatctttggctaccggtcaatatactacttcttctgttgactatgctcggaagtataagaagtttgtgatgggattcgtctcgacacgtcaccttggcgaggttcagtctgaagttagctcgccttcggaggaggaagattttgtcgtcttcacgacaggtgtcaacctctcctcgaagggtgacaagctgggacagcagtaccaaactcctgagtcggctgttggacgcggtgccgactttattattgctggccgtggaatttatgctgctcctgatcccgtggaggcggcgaagcagtaccagaaggagggatgggatgcatacctgaagcgtgttggtgcgcaataa

SEQ ID NO: 155961 - protein, 277 aa, Aspergillus oryzae RIB40
MSSKSQLTYSARASKHPNALVKKLFEVAEAKKTNVTVSADVTTTKELLDLADRLGPYIAVIKTHIDILSDFSEETITGLKALAEKHNFLIFEDRKFIDIGNTVQKQYHGGTLRISEWAHIINCSILPGEGIVEALAQTASAEDFPYGSERGLLILAEMTSKGSLATGQYTTSSVDYARKYKKFVMGFVSTRHLGEVQSEVSSPSEEEDFVVFTTGVNLSSKGDKLGQQYQTPESAVGRGADFIIAGRGIYAAPDPVEAAKQYQKEGWDAYLKRVGAQ

SEQ ID NO: 155962 - DNA, 831 bp, Laccaria bicolor S238N-H82
  CDS (1)..(831)
atggctccttcagcgcatctgaaatcctatggacaaagggctcttaaacagacaaaccccgcagctattcttttgctagagacaatggagcggaaaaaaactaatctcgccgtcagtgtcgacgtcaccacatctgccgatttcttgacaatcgtcgacgccgtcggcccatttgtctgtcttatcaagacacatatcgatatccttgaagacttcgaatattcccttattgaaagactagaaaatctaagcctcaagcatgatttcctcatttttgaggatagaaaattcgcggatataggaaataccgtcgcacaccagtactcaagcggtgtctacaagatcgctagatggtcccatctcaccaatgcacatccagtccccggtccctcaatcatcaagggactcgcgtcagttggtctgcccgttggtcgaggcttacttttgctagccgaaatgagtaccaaagggtcccttgcaactgggacatacacagaagatgcggtacggatggcccgtttaaatcgagattttgttgtcggcttcatcgcccaacatcggatggacgggatcggtgcagccccagacgaggatgtcactgacgaggatttccttgtcttgacgcccggggtggggcttgactcaaaaggcgacgcaatgggccagcaatacaggacaccagaggaagtcattttggattctggttgtgatgtgatcattgttggccgtggcgtgtatggcaccgatctcaaggccacagctgctattgtcgctcgtgctgaaagatatatggccgaaggctgggcggcgtacttaagacgtttagtatga

SEQ ID NO: 155963 - protein, 276 aa, Laccaria bicolor S238N-H82
MAPSAHLKSYGQRALKQTNPAAILLLETMERKKTNLAVSVDVTTSADFLTIVDAVGPFVCLIKTHIDILEDFEYSLIERLENLSLKHDFLIFEDRKFADIGNTVAHQYSSGVYKIARWSHLTNAHPVPGPSIIKGLASVGLPVGRGLLLLAEMSTKGSLATGTYTEDAVRMARLNRDFVVGFIAQHRMDGIGAAPDEDVTDEDFLVLTPGVGLDSKGDAMGQQYRTPEEVILDSGCDVIIVGRGVYGTDLKATAAIVARAERYMAEGWAAYLRRLV

SEQ ID NO: 155964 - DNA, 795 bp, Schizosaccharomyces japonicus yFS275
  CDS (1)..(795)
atgtcggacatcgccttgaaaacgtacacggagcgcgccaatgtgcatcctaatgcagtcgccaagaagttgctgcgtttgatggacgagaagaagtcaaacctctcggtcgctgtggacttgacgaagaagaaccaagtcctggaactcgttgacaagattggtccctcgatctgcttgttgaagactcacattgacattgtggaggactttgacgcagacatggtccaacagctggttgctctggctgagaagcacaagtttttgatttttgaggatcgcaagtttgccgacattggcaacactgtcaagcttcagtactctgctggtgtgtacaagattgcttcttgggctgacatcaccaactgccacactgttcccggtgagggtattattagcggtttgaaggaagttggtcttcccttgggtcgtggtttgttgcttttggctgagatgtcttcgaagggaaccctggccactggaagctacacacaagccacattggaattggctgagaagcacaacgacttctgtatgggttttatcgccagacgccgcttccccggtctcaagagcgactttattcacatgacacccggtgtcggtttggacgttaagggcgatggccttggtcaacaataccgtacaccagaggaagtgatctgtgagagccagagcgatatcattatcgtcggtcgcggtgtctacggcagcggccgtgatgctgctcaagaagctgagcgctacagaaaggccggctgggaggcctaccagcgtcgcatttccaagcagtaa

SEQ ID NO: 155965 - protein, 264 aa, Schizosaccharomyces japonicus yFS275
MSDIALKTYTERANVHPNAVAKKLLRLMDEKKSNLSVAVDLTKKNQVLELVDKIGPSICLLKTHIDIVEDFDADMVQQLVALAEKHKFLIFEDRKFADIGNTVKLQYSAGVYKIASWADITNCHTVPGEGIISGLKEVGLPLGRGLLLLAEMSSKGTLATGSYTQATLELAEKHNDFCMGFIARRRFPGLKSDFIHMTPGVGLDVKGDGLGQQYRTPEEVICESQSDIIIVGRGVYGSGRDAAQEAERYRKAGWEAYQRRISKQ

SEQ ID NO: 155966 - DNA, 825 bp, Aspergillus nidulans FGSC A4
  CDS (1)..(825)
atgtcttcgaagtcccacctcccctacgcaattcgcgcaaccaaccatcccaaccctttaacatctaaactcttctccatcgccgaggagaagaaaaccaacgtcaccgtctccgcagacgttactacttccgccgagctcctcgatcttgctgaccgcctaggcccctatatcgcagttctgaaaacccacatcgacatcctcaccgatctcaccccgtcgaccctttcctcgctccaatccctcgcgacaaagcacaacttcctcatctttgaggaccgcaagttcatcgacatcggcaacaccgtgcaaaagcagtaccacggtggcgctctccgcatctccgaatgggcacacatcatcaactgcgccatcctgccgggcgaagggatcgtcgaggccctcgcacagacaaccaagtctcctgactttaaagacgcgaatcaacgaggtctcctgattcttgccgagatgacgagtaagggatctcttgcgacaggggagtacacggcacgctcggttgagtacgcgcggaagtataaggggtttgtgatgggattcgtgagtacaagggcgttgagtgaggtgctgcccgaacagaaagaggagagcgaggattttgtcgtctttacgactggggtgaatctgtcggataagggggataagctggggcagcagtatcagacacctgggtcggcggttgggcgaggtgcggactttatcattgcgggtaggggcatctataaggcggacgatccagtcgaggcggttcagaggtaccgggaggaaggctggaaagcttacgagaaaagagttggactttga

SEQ ID NO: 155967 - protein, 274 aa, Aspergillus nidulans FGSC A4
MSSKSHLPYAIRATNHPNPLTSKLFSIAEEKKTNVTVSADVTTSAELLDLADRLGPYIAVLKTHIDILTDLTPSTLSSLQSLATKHNFLIFEDRKFIDIGNTVQKQYHGGALRISEWAHIINCAILPGEGIVEALAQTTKSPDFKDANQRGLLILAEMTSKGSLATGEYTARSVEYARKYKGFVMGFVSTRALSEVLPEQKEESEDFVVFTTGVNLSDKGDKLGQQYQTPGSAVGRGADFIIAGRGIYKADDPVEAVQRYREEGWKAYEKRVGL

SEQ ID NO: 155968 - DNA, 837 bp, Aspergillus fumigatus Af293
  CDS (1)..(837)
atgtcgtccaagtcgcaattgacttacggtgctcgagccagcaagcaccccaatcctctggcaaagagactttttgagattgccgaagcaaagaagacaaacgttaccgtctctgctgatgtgacgacaacccgagaactcctggacctcgctgaccgtctcggtccctacatcgccgtcatcaagacacacatcgacatcctcaccgatttcagcgtcgacactatcaatggcctgaatgtgctggctcaaaagcacaactttttgatcttcgaggaccgcaaattcatcgacatcggcaataccgtccagaagcaataccacggcggtgctctgaggatctccgaatgggcccacattatcaactgcagcgttctccctggcgagggcatcgtcgaggctctggcccagaccgcatctgcgcaagacttcccctatggtcctgagagaggactgttggtcctggcagagatgacctccaaaggatcgctggctacgggcgagtataccaaggcatcggttgactacgctcgcaaatacaagaacttcgttatgggtttcgtgtcgacgcgggccctgacggaagtgcagtcggatgtgtcttcagcctcggaggatgaagatttcgtggtcttcacgacgggtgtgaacctctcttccaaaggagataagcttggacagcaataccagactcctgcatcggctattggacgcggtgccgactttatcatcgccggtcgaggcatctacgctgctcccgacccggttgaagctgcacagcggtaccagaaagaaggctgggaagcttatatggccagagtatgcggcaagtcatga

SEQ ID NO: 155969 - protein, 278 aa, Aspergillus fumigatus Af293
MSSKSQLTYGARASKHPNPLAKRLFEIAEAKKTNVTVSADVTTTRELLDLADRLGPYIAVIKTHIDILTDFSVDTINGLNVLAQKHNFLIFEDRKFIDIGNTVQKQYHGGALRISEWAHIINCSVLPGEGIVEALAQTASAQDFPYGPERGLLVLAEMTSKGSLATGEYTKASVDYARKYKNFVMGFVSTRALTEVQSDVSSASEDEDFVVFTTGVNLSSKGDKLGQQYQTPASAIGRGADFIIAGRGIYAAPDPVEAAQRYQKEGWEAYMARVCGKS

SEQ ID NO: 155970 - DNA, 711 bp, Halorhodospira halophila SL1
  CDS (1)..(711): transl_table=11
atgagcgtacctggcccgccgcggttggtcgtggcgctggacttcccggccgcagccccggccgaggccctggcggcacagctcgatccacgcctgtgccgcttaaaggtgggcaaggagctgttcacccgcgctgggccgcagttggtggagcgacttcacgcccggggcttcgaggtcttcctcgacctcaagtaccacgacattcccaacaccgtggccggcgcctgccgtgcggccgcggatctcggcgtgtggatggtcaacgtccacgccctgggcggccgacggatgctcgaggccgccgccgaggcggtggcggccgccgagggtcggaccctgatcaccgcagtgaccgtcctgaccagccacgacgcggcgaccctcgaggagatcggcctggccggaccgccccgcgaggcggtcctgcgcctggccggcctagcccaggcgagcgggctcgacggcgtggtctgctccccggaggaggcggcggcgattggtgagcggttcggcgccgggctgctgcgggtgaccccgggggtgcgtccggccggtgcggctttgggggaccagcagcgcatcgcaacaccggctgccgcggtagcggcgggctgcgatcacttggtcgtggggcgaccgatcaccgcggcggaggatcccgccgccgccgcggcggccatcgccgcggagatcgccgccgccggatga

SEQ ID NO: 155971 - protein, 236 aa, Halorhodospira halophila SL1
MSVPGPPRLVVALDFPAAAPAEALAAQLDPRLCRLKVGKELFTRAGPQLVERLHARGFEVFLDLKYHDIPNTVAGACRAAADLGVWMVNVHALGGRRMLEAAAEAVAAAEGRTLITAVTVLTSHDAATLEEIGLAGPPREAVLRLAGLAQASGLDGVVCSPEEAAAIGERFGAGLLRVTPGVRPAGAALGDQQRIATPAAAVAAGCDHLVVGRPITAAEDPAAAAAAIAAEIAAAG

SEQ ID NO: 155972 - DNA, 741 bp, Yersinia enterocolitica subsp. enterocolitica 8081
  CDS (1)..(741): transl_table=11
atgacgtctgcaactaaaactaataacagtggctcaatatcttccccgatcgttgttgcactggattatgccaataaagacgcggcgttagcttttgctgatcgtgttaacccacgagattgccgattaaaagtaggcaaagagatgtttactttatatggtccccaacttgttcgagatctgcatcagcgcggctttgaggtctttctggatttgaaattccacgatattcctaacactaccgcccgtgcggttgcggcggcggcggaattgggggtgtggatggtaaatgtccatgccactggggggatgcgcatgatgacggcggcaaaagaagcattattgccctttggccaacaagcaccattactgattgctgtgacggtgctaaccagcatggatggtggggatttacgtgatattggcattaatatcaccccagccgaacaggcagagcggttggcaaaattaacctgggattgcggtttagatggggtggtctgttctgcccacgaagcggtgcgcttaaagcaggtgtgtggtgaggatttcaaactggtgacaccggggattcgcccggagggcagtgatgctggcgatcagcgccgtattatgacaccagaacaagcggtagcggcaggtgtggattatatggtgatagggcgtccgatcacccaatcccctgacccggaaaaaaccttgaaagacattctggcctctttgtgtaagggggcaaaatga

SEQ ID NO: 155973 - protein, 246 aa, Yersinia enterocolitica subsp. enterocolitica 8081
MTSATKTNNSGSISSPIVVALDYANKDAALAFADRVNPRDCRLKVGKEMFTLYGPQLVRDLHQRGFEVFLDLKFHDIPNTTARAVAAAAELGVWMVNVHATGGMRMMTAAKEALLPFGQQAPLLIAVTVLTSMDGGDLRDIGINITPAEQAERLAKLTWDCGLDGVVCSAHEAVRLKQVCGEDFKLVTPGIRPEGSDAGDQRRIMTPEQAVAAGVDYMVIGRPITQSPDPEKTLKDILASLCKGAK

SEQ ID NO: 155974 - DNA, 741 bp, Prochlorococcus marinus str. MIT 9303
  CDS (1)..(741): transl_table=11
atgatgacctcgccattgactcctgccgatcaactgatcattgctcttgatggcatggagcgggctgaggcccttgcattcatctcaaagttgccagaggtcagttgggtcaaggtgggcctggaactgtttgttagtgcggggccagaggttttggctgatctcagggagcaagggttgcggatatttcttgatctcaagtttcacgatatccctgccaccatggcaggagcttgtcgccgagcggcgagctttggcgctgagttgatcacggtgcatgcctgtgctggccgtgctgcccttgatgaagctcagactgctgcttgcgagggggctgcggaggttggcttgtcagcaccccggctgttggccgtcactgtgctcaccagttgggatcagaagcgtctagcgaatgagctgtgcattcctcagtctcttcaggccagggtggagtggttggctgagttggcagcggagtcagggttaggcggctgcgtgtgttctccctgggaagtaagcggcttacgccgacttcatccctcgccatttgagttagtgactcctggcattcgcccctcgggggctgaattggcggatcaggtcagggtcatgagtcctgcagcggcgctgaatgcaggagcttcccgtttggtaatcggcaggccgattacccgtgctgttgatccggcagaggcgtttgcacgctgctgctttgagattgaacagcgtcagctggactga

SEQ ID NO: 155975 - protein, 246 aa, Prochlorococcus marinus str. MIT 9303
MMTSPLTPADQLIIALDGMERAEALAFISKLPEVSWVKVGLELFVSAGPEVLADLREQGLRIFLDLKFHDIPATMAGACRRAASFGAELITVHACAGRAALDEAQTAACEGAAEVGLSAPRLLAVTVLTSWDQKRLANELCIPQSLQARVEWLAELAAESGLGGCVCSPWEVSGLRRLHPSPFELVTPGIRPSGAELADQVRVMSPAAALNAGASRLVIGRPITRAVDPAEAFARCCFEIEQRQLD

SEQ ID NO: 155976 - DNA, 696 bp, Shewanella baltica OS155
  CDS (1)..(696): transl_table=11
atgacgactaaacctatcctcgtagcgcttgattacgataacaaaaaccacgctttacaactgatagaaaaactcgatcccaacatgtgccgccttaaagtcggcaaagaaatgtttaccctgtttggcccacaactggtgaaagatatccatgatcgtggttttgatttattcctcgatttaaaatttcacgatattcctaacacggtcgctaaagctgtggccgcagccgcagagcttggcgtttggatgacaaacgtgcatgccagcggtggtttagccatgatggaagcggccaaaaaggccttgctgccatacggcgacaaagcgcctatgctgatcgctgtgacggtattaacctctatgagcgatgatgatcttaaattactcggcatcaatgtgcctgcatttgagcatgtgcaacgtttagctaagctgacgcagcaagcaggactcgacggcgtggtgtgttcagcccaagaggcgacagcgttaaaatcgttgttaggtcaggatttcaagctcgtgacgccggggatccgcccagttggtagtgatgctggcgatcaacaccgcgtgatgactccacctcaagcgattgcagcgggatcagattacctagtgattggccgtccaatcaccaaagccgccgatccattagcggcattgcaagcgattcaccaatcattggcatag

SEQ ID NO: 155977 - protein, 231 aa, Shewanella baltica OS155
MTTKPILVALDYDNKNHALQLIEKLDPNMCRLKVGKEMFTLFGPQLVKDIHDRGFDLFLDLKFHDIPNTVAKAVAAAAELGVWMTNVHASGGLAMMEAAKKALLPYGDKAPMLIAVTVLTSMSDDDLKLLGINVPAFEHVQRLAKLTQQAGLDGVVCSAQEATALKSLLGQDFKLVTPGIRPVGSDAGDQHRVMTPPQAIAAGSDYLVIGRPITKAADPLAALQAIHQSLA

SEQ ID NO: 155978 - DNA, 696 bp, Shewanella loihica PV-4
  CDS (1)..(696): transl_table=11
atgagcaacaaacctattatagtggcgctagattacgataataaatccgaagctttgcagctcatcgatcagctagaccccaatatgtgccgcctcaaaataggcaaagagatgttcaccctctttggccctgaattggttaaagagatccacagtcgcgactttgaccttttcctggatctaaaattccacgacattccgaacacagtcgccaaggccgtcgctgctgcggcagagctaggggtgtggatgactaacgtgcatgccagcggtggactggccatgatgcaggcagctcgcgaggcgctgcttccatatggcgacaaggccccgctgctgatcgccgtgacggtactaacctcaatgagcgatgaagagctcgagctgcttggcatcaatgtgccggcggccgagcatgttaagcgtctggcaagcctcaccaaacaggcaggactgaacggtatcgtctgttcggcccaggaagccagcatgctaaaggccgaatttggcgccgactttaagttggttacgccgggtattcgcccagccggcagcgacaagggggatcagcaccgcgtgatgacgccgacgcaggcgctggcagcgggttccgattacctggtgattggccgtcctatcaccaaggcggctaatccactcgcggcattgaccgagatccatgcatcgcttaaatag

SEQ ID NO: 155979 - protein, 231 aa, Shewanella loihica PV-4
MSNKPIIVALDYDNKSEALQLIDQLDPNMCRLKIGKEMFTLFGPELVKEIHSRDFDLFLDLKFHDIPNTVAKAVAAAAELGVWMTNVHASGGLAMMQAAREALLPYGDKAPLLIAVTVLTSMSDEELELLGINVPAAEHVKRLASLTKQAGLNGIVCSAQEASMLKAEFGADFKLVTPGIRPAGSDKGDQHRVMTPTQALAAGSDYLVIGRPITKAANPLAALTEIHASLK

SEQ ID NO: 155980 - DNA, 720 bp, Geobacillus thermodenitrificans NG80-2
  CDS (1)..(720): transl_table=11
atgcacacgccgttcattgtcgctcttgattttccatctaaacatgacgtacagcagtttttacgcccgtttagcggcacgccgctgtttgtgaaagtcggcatggagctgtattatcaggagggtccagccatcatcgccatgttcaaagaacaaggacatgccgtgtttttagatttaaaactgcacgacatcccgaatacggtgaaacaggcgatgaaagggctcgctcgcttaggtgtcgatttagtgaacgttcacgccgccggcggccggcgcatgatggaagcggccatagaggggcttgacgctggaacgccaagcggcgctgctcggccgcgctgcatcgccgtcacccagctgaccagcacggatgagcggatgcttcatgaagagctgtggatttcccagccgcttgaggaaacggtcagccattacgcagcgttggcgcaagcgagcggaatggacggtgtcgtctgctcggcgaacgaagcgacgctcatcaaagaacggtgcggtgcttcgtttctcgcggtcacaccggggattcgctttgccgacgattcagtgcatgaccaagtgcgcgtcgtgacgccaaggaaagcacgcgcgctcggcgccgactacatcgtcatcggccgcagcatcacccgcgccgctgacccgctcgcggcctactcccgcttgcaacacgaatggaacggaggagaaacagaatga

SEQ ID NO: 155981 - protein, 239 aa, Geobacillus thermodenitrificans NG80-2
MHTPFIVALDFPSKHDVQQFLRPFSGTPLFVKVGMELYYQEGPAIIAMFKEQGHAVFLDLKLHDIPNTVKQAMKGLARLGVDLVNVHAAGGRRMMEAAIEGLDAGTPSGAARPRCIAVTQLTSTDERMLHEELWISQPLEETVSHYAALAQASGMDGVVCSANEATLIKERCGASFLAVTPGIRFADDSVHDQVRVVTPRKARALGADYIVIGRSITRAADPLAAYSRLQHEWNGGETE

SEQ ID NO: 155982 - DNA, 702 bp, Aeromonas salmonicida subsp. salmonicida A449
  CDS (1)..(702): transl_table=11
atgctagatcccaaagtactggtagcgctggattatcagcacgaggccgatgccttcgcgttcattgaacgtatctctccggcccagtgccgcctcaaggtcggcaaggagatgttcaccctgtttggtccccagtttgtacgtcagctggtggtcaggggattcgatgtctttctggatctgaagtttcacgacattcccaacacagtggccaaggccgtggccgccagtgccgagctgggtgtctggatggtcaatgtccatgccagcggtggcgagcggatgatgcgtgccgccaaggaggcgctggctccctatggtgacaaggctcccctgttgatcggtgtgacagtgttgaccagcatggagcaagccgacatggcgccgcttggtctggatgtgagccctgccgagcaggtgatccgtctggccacactggtcaaaacctcgggactggatggggtggtctgttccgccaatgaagcccgcgagctgaaagccttgcttggtgcagacttcaagctggtgacgccaggtattcgtcctgcgggctctgatgcaggtgatcagcgtcgggtgatgacgccgcgtgctgcgatggatgcaggggctgactatctggtgattggtcgacccatcactcaggcagatgatcccgccgctactctctcaagcatcaataccgagctggcagggcgataa

SEQ ID NO: 155983 - protein, 233 aa, Aeromonas salmonicida subsp. salmonicida A449
MLDPKVLVALDYQHEADAFAFIERISPAQCRLKVGKEMFTLFGPQFVRQLVVRGFDVFLDLKFHDIPNTVAKAVAASAELGVWMVNVHASGGERMMRAAKEALAPYGDKAPLLIGVTVLTSMEQADMAPLGLDVSPAEQVIRLATLVKTSGLDGVVCSANEARELKALLGADFKLVTPGIRPAGSDAGDQRRVMTPRAAMDAGADYLVIGRPITQADDPAATLSSINTELAGR

SEQ ID NO: 155984 - DNA, 741 bp, Enterobacter sp. 638
  CDS (1)..(741): transl_table=11
atgacgtctgttgcatcctcttcttcccgcatagttaccgaatctcccgttgttgtcgcactcgactataacaatcgcgatagcgcacttgcctttgtcgatcttattgacccacgtgactgccgtctgaaagtgggcaaagaaatgttcacgctgttcggcccgcaaattgttcgcgatctgcagcaacgcggtttcgacgtctttctcgacctcaaattccacgatatcccgaataccactgcgcatgcggttgctgccgcggcagacctgggtgtgtggatggtcaacgtgcatgcatcgggtggggcgcgaatgatgacggctgctcgcgaagcacttattccttttggaaaagatgcgccgttgcttattgctgtgactgtgttgaccagcatggaagcaagcgatctgcttgatttaggtgtgacgttgtcacctgctgagcacgccgagcgacttgcgcgcctcacgcaaaattgtgggcttgatggagtggtttgttcagcgcaggaagccgtgcgctttaaatctgccctgggtcacaacttcaagctggtcacgccagggattcgaccgcagggcagtgacgcgggcgatcaacggcgtattatgacccctgaagaggcgctggcggcaggcgttgattacatggttattggccggccggtcacgcaatctgccgaccctgcgctaaccttaaaagcgattaacgcttcactgggcaaggtgacaggatga

SEQ ID NO: 155985 - protein, 246 aa, Enterobacter sp. 638
MTSVASSSSRIVTESPVVVALDYNNRDSALAFVDLIDPRDCRLKVGKEMFTLFGPQIVRDLQQRGFDVFLDLKFHDIPNTTAHAVAAAADLGVWMVNVHASGGARMMTAAREALIPFGKDAPLLIAVTVLTSMEASDLLDLGVTLSPAEHAERLARLTQNCGLDGVVCSAQEAVRFKSALGHNFKLVTPGIRPQGSDAGDQRRIMTPEEALAAGVDYMVIGRPVTQSADPALTLKAINASLGKVTG

SEQ ID NO: 155986 - DNA, 738 bp, Pseudomonas mendocina ymp
  CDS (1)..(738): transl_table=11
atgcgcggcgtttttgtcctgtccgagacccgcctcatgcccgcctgccaaaccccgatcatcgtcgccctcgactttcccagccgtgacgccgccctggccctggccgatcgcctcgatccggcgctgtgccgggtcaaggttggcaaggagctgttcacccgcagcggcccgcaggtggtcgaggcgctgcaggccaagggcttcgagctgtttctcgatctgaaattccacgacatccccaacaccacggccatggcggtcaaggctgcggccgaactgggcgtatggatggtcaacgtgcactgctccggcggcctgcgcatgatggcggcctgccgcaacgagctggacaagctgactggcgccaagccgctgctgatcggcgtgaccgtgctgaccagcatggagcagcaggacctggccggcatcggcctggacgtaccgccgcaggagcaggtactgcgcctggccggcctggcagccgatgccgggctcgatggtctggtctgctcggcgcaggaggcgcaggcgctgaaggtcgcgcagccgcgtctgcagctggtgacgccgggcattcgtcctgccggcagcaatgccgatgaccagaaacgcatccttaccccgcgtcaggcgctggaggccggctccgactatctggtgatcggtcgcccgatcagccaggccgccgacccggcgcaggcgctggctgcggtggtcgccgagctgcgcgcctga

SEQ ID NO: 155987 - protein, 245 aa, Pseudomonas mendocina ymp
MRGVFVLSETRLMPACQTPIIVALDFPSRDAALALADRLDPALCRVKVGKELFTRSGPQVVEALQAKGFELFLDLKFHDIPNTTAMAVKAAAELGVWMVNVHCSGGLRMMAACRNELDKLTGAKPLLIGVTVLTSMEQQDLAGIGLDVPPQEQVLRLAGLAADAGLDGLVCSAQEAQALKVAQPRLQLVTPGIRPAGSNADDQKRILTPRQALEAGSDYLVIGRPISQAADPAQALAAVVAELRA

SEQ ID NO: 155988 - DNA, 696 bp, Streptococcus suis 05ZYH33
  CDS (1)..(696): transl_table=11
atgaaagaaacaagaccaattattgcccttgactttgcaggtaaagaagaagttcagtcttttctggaacagttcccaccagatgagaaactctatgtaaaggttggaatggagttgtattatgcggagggaccaggtattatcaattatttgaaagactgcggtcacagtatttttctagatttgaaactgcatgatattcctaataccgtcgagtctgctatgaaagtcttggcaaaactcggtgtggatatgaccaacgttcacgctgctggtggtgttgagatgatgcgggcagcacgaaggggattgggtaaggatgctgttttaatagcggtcactcagttgacctctacctcagaagagcagatgaggacggaccagaatatacagactagtttgcaggaagcagttgttcattatgctcaaagagcacaagaagctggtcttgatggggtggtttgttcagctcatgaggtggctttgattaaagatgctacaagttctgattttgtgtgcctgacgccagggattcgtccgactggcggtgaagtaggcgatcagaaacgagttatgacaccagcagatgctgctcgaatcggtagtgattacattgtggtaggtcgcccgattacaaaatcagaacatccttaccagacctatttgtctattaaagaggagtggaatcgtggataa

SEQ ID NO: 155989 - protein, 231 aa, Streptococcus suis 05ZYH33
MKETRPIIALDFAGKEEVQSFLEQFPPDEKLYVKVGMELYYAEGPGIINYLKDCGHSIFLDLKLHDIPNTVESAMKVLAKLGVDMTNVHAAGGVEMMRAARRGLGKDAVLIAVTQLTSTSEEQMRTDQNIQTSLQEAVVHYAQRAQEAGLDGVVCSAHEVALIKDATSSDFVCLTPGIRPTGGEVGDQKRVMTPADAARIGSDYIVVGRPITKSEHPYQTYLSIKEEWNRG

SEQ ID NO: 155990 - DNA, 690 bp, Dichelobacter nodosus VCS1703A
  CDS (1)..(690): transl_table=11
atgaatcattctccaatcattattgctttggattttcctcaaaaagaaccagcgcttacttgcgctaaacaactttcgccgcagcactgtcgtttaaaaattggcagcgaactttttacacgtgaaggcgcgccgttaattgcgcaattgcgagaattgggttttgagatttttcttgatttgaaatttcacgatattccaaacacggttgccgctgcggtgcgcgttgcggcagatttgggcgtttggatggttaatgtacacgcaagcggcgggcttgccatgatgcaagcagcaaaagaagccgctaccgccgccaaacaagcgcctttgctaacggcggttacggtgctgacgagttttgatgatgcagctttgggtagcgttggcgttgacgatcttatggaatcgcaggttcagcgtttagcgcgattggcgtttaccgcgggtttagatggcgtggtgtgttcggcggcagaagtgcccgtaattaaaaaaagtaccgcgccccagtttttaaccgtcacgcccggaattcgtccccaacagagtgcacatgacgatcaaaaacgcgtatttacacctaaggaagcgctggctcaaggaagcgattatttagtgatcggacgaccgattacgcgcgccgccgatcctgcgcaagcattaaatgccatcatggcaacattatga

SEQ ID NO: 155991 - protein, 229 aa, Dichelobacter nodosus VCS1703A
MNHSPIIIALDFPQKEPALTCAKQLSPQHCRLKIGSELFTREGAPLIAQLRELGFEIFLDLKFHDIPNTVAAAVRVAADLGVWMVNVHASGGLAMMQAAKEAATAAKQAPLLTAVTVLTSFDDAALGSVGVDDLMESQVQRLARLAFTAGLDGVVCSAAEVPVIKKSTAPQFLTVTPGIRPQQSAHDDQKRVFTPKEALAQGSDYLVIGRPITRAADPAQALNAIMATL

SEQ ID NO: 155992 - DNA, 696 bp, Vibrio cholerae O395
  CDS (1)..(696): transl_table=11
atgaacgacccaaaagtgattgttgcactggactatgacaatctggcggatgcgctcgcgtttgtggacaaaattgacccaagcacatgtcgactcaaagtgggtaaagagatgtttactctatttggtcctgattttgtccgtgagctgcataaacgaggtttttctgtgtttctggatcttaaatttcacgatattccgaatacctgttcaaaagcggtgaaagctgccgctgagcttggggtttggatggtgaatgtgcacgcgagtggtggcgagcgaatgatggcagcatcgcgtgagattctggagccgtatggtaaagagcgcccactgctgattggtgtcactgtattgaccagtatggaatctgccgatttacaaggtattggcatcttgagtgcgccacaagatcatgtgctgcgattagcaacgctcgccaaaaatgctggtcttgatggtgtggtatgctccgcacaagaggcatcactattgaagcaacatttggggcgtgaattcaaattggtgacgccaggaattcgtccagcgggttcagagcaaggcgatcaacgccgtattatgactccagcccaagccattgcctctggttcagattatctcgtgatcggtcgccctatcactcaagccgcacatcctgaagtggttctggaagagataaacagctctttagtttag

SEQ ID NO: 155993 - protein, 231 aa, Vibrio cholerae O395
MNDPKVIVALDYDNLADALAFVDKIDPSTCRLKVGKEMFTLFGPDFVRELHKRGFSVFLDLKFHDIPNTCSKAVKAAAELGVWMVNVHASGGERMMAASREILEPYGKERPLLIGVTVLTSMESADLQGIGILSAPQDHVLRLATLAKNAGLDGVVCSAQEASLLKQHLGREFKLVTPGIRPAGSEQGDQRRIMTPAQAIASGSDYLVIGRPITQAAHPEVVLEEINSSLV

SEQ ID NO: 155994 - DNA, 705 bp, Acidiphilium cryptum JF-5
  CDS (1)..(705): transl_table=11
atgggcgcggcacgacatggcgcacggcggctgatcgccgcgatcgacacgccttcgctcgatgaggcgcggcggctggcgggcgcggtggggccgcattgcgggctggtgaagctggggctggaggcgttctgcgccaacgggccggcgctgctggacgccgccgccgggcacgacgtgtttctcgatctcaagctgcacgacattccgaacacggtggccggggcggtgcgcgcgctgctgccgttgcggccggcgatgctgacggtgcacgcggcgggcggcagcgccatgatcgcggcggcgcgggaagcggccgaggcggcgggcgcggcgcggccggtgctgctggcggtgacggtgctgaccagcctttcggccggcgcgctggcggagaccggggtggccggcggaccgcgccagcaggtgctgcggctggcgaagctggcgctcgccgccggggcggacgggctggtgtgcagcgccaacgagatttcggtgctgcgcgacgcgttcggcgccgatccggtgctggtggtgccgggaataaggcccgcgggcgccgatcatggcgaccaggcgcgggtggcgacgccggaagcggcgatcgcggcgggggcgagttatatcgtggtcggccggccgatcaccaccgccgccaatccggcggcggcagcagcttccatcgccgcgtcgatcggctga

SEQ ID NO: 155995 - protein, 234 aa, Acidiphilium cryptum JF-5
MGAARHGARRLIAAIDTPSLDEARRLAGAVGPHCGLVKLGLEAFCANGPALLDAAAGHDVFLDLKLHDIPNTVAGAVRALLPLRPAMLTVHAAGGSAMIAAAREAAEAAGAARPVLLAVTVLTSLSAGALAETGVAGGPRQQVLRLAKLALAAGADGLVCSANEISVLRDAFGADPVLVVPGIRPAGADHGDQARVATPEAAIAAGASYIVVGRPITTAANPAAAAASIAASIG

SEQ ID NO: 155996 - DNA, 675 bp, Haemophilus influenzae PittGG
  CDS (1)..(675): transl_table=11
atggcattggatttcgagaaagaagcagaggctcttgctttagttgatcaaattgatccaagtttgtgtcgattaaaagtgggtaaagaaatgtttactacacttggtattaattttgtaaagcaattacatcaacgtaattttgatgtttttttggatctgaaatatcacgatattccaaatacggtagcaagagcagttcgttctgctgctgatttaggcgtatggatggtggatttacacgcaagtggtggcttgcgtatgatggaagacgcgaagaaaattcttgaaccttatgggaaagatgcgccattgcttattgctgtgacggtattaaccagtatggaagacttggatttattacaaattgggattaatgcatcgccaatggaacaagttttacgcttagctcatttaacccaacgggcgggtttagatggtgtagtctgttcccctcaagaagttgaaattttacgtaacgcttgtggagaagactttaaattagtgaccccagggattcgtccaataggaactgattttggcgatcaacgacgtgtgatgacgcctactgcagcaattcgtgcaggttcagattatttagttattggacgcccaataactcaagcggataatcctgcggaggttctccgttctattaatgtatctattgggtaa

SEQ ID NO: 155997 - protein, 224 aa, Haemophilus influenzae PittGG
MALDFEKEAEALALVDQIDPSLCRLKVGKEMFTTLGINFVKQLHQRNFDVFLDLKYHDIPNTVARAVRSAADLGVWMVDLHASGGLRMMEDAKKILEPYGKDAPLLIAVTVLTSMEDLDLLQIGINASPMEQVLRLAHLTQRAGLDGVVCSPQEVEILRNACGEDFKLVTPGIRPIGTDFGDQRRVMTPTAAIRAGSDYLVIGRPITQADNPAEVLRSINVSIG

SEQ ID NO: 155998 - DNA, 687 bp, Klebsiella pneumoniae subsp. pneumoniae MGH 78578
  CDS (1)..(687): transl_table=11
atggttgcgctcgactatgataatcgcgataaagcgctggcatttgtcgaccgcatcgacccgcgcgactgccgcctgaaggtgggcaaagagatgttcaccctgctgggcccgcagtttgtccgcgatctgcatcagcgtgggtttgaggtgttcctggaccttaagtttcacgatattcccaacaccaccgcccgcgcggtggccgcagcggctgagctgggcgtatggatggtgaatgtccatgcttccggcggcgcgcgaatgatgaccgccgcgcgcgaagcgctgctgccgtttggcaaagatgcgccgttgctgatcgctgtcacggtgctcaccagcatggagtccagcgatctacaggatctgggcattaccttatctccggctgactacgcggcgaagctggcggcgctgactcaacgctgcggccttgatggggtggtgtgttcagcccaggaggctgtgcgctttaagcatgagctggggcaggcgtttaagctggtgaccccggggattcgtccgcagggcagcgacgctggcgatcagcggcgaattatgactcctgagcaggctcaggaagctggggtagactatatggtgattggtcgcccggttactcagtcggcggatccagccgcgacgctgcgggcgatcaacgattctctgcgcaagggggcataa

SEQ ID NO: 155999 - protein, 228 aa, Klebsiella pneumoniae subsp. pneumoniae MGH 78578
MVALDYDNRDKALAFVDRIDPRDCRLKVGKEMFTLLGPQFVRDLHQRGFEVFLDLKFHDIPNTTARAVAAAAELGVWMVNVHASGGARMMTAAREALLPFGKDAPLLIAVTVLTSMESSDLQDLGITLSPADYAAKLAALTQRCGLDGVVCSAQEAVRFKHELGQAFKLVTPGIRPQGSDAGDQRRIMTPEQAQEAGVDYMVIGRPVTQSADPAATLRAINDSLRKGA

SEQ ID NO: 156000 - DNA, 699 bp, Actinobacillus succinogenes 130Z
  CDS (1)..(699): transl_table=11
atggatagcaaaattattgttgcattagattacgaaacagaagcggaagcattgagtttggtcgatcaaatagatccgagcctttgccggttaaaagtgggcaaagaaatgtttactaccttggggacaaactttgttaaacaattacaggaaagaaaatttgacgtatttttggatttaaaattccatgatattccgaatacggttgcacgtgccgtgcgttcggcggcggatttgggcgtatggatggtggatttacacgccagcggcggtttgcgcatgatggaagaagctaaaaatattcttgaaccttacggtaaagacgctccgattctgatcggcgtgaccgtgttaaccagtatggaagatttggatttattacaaatcggcattaatgcatcgccgatggaacaggtgatccgtttagcccatttaactcagcgtgcgggattggacggcgtggtttgttcaccgcaggaagtggaaattttacgtaaaaatcttggttcggattttaaactggtaacaccgggaattcgtcctgtaggttccgaattcggtgatcaacgccgtgttatgacaccgtcggccgccgtacgttcaggagccgattatttagtgattggtcgcccgatcacacaggcggaaaatccggctgaagtgttgcgttccattaacgcttctttagcgaatatctga

SEQ ID NO: 156001 - protein, 232 aa, Actinobacillus succinogenes 130Z
MDSKIIVALDYETEAEALSLVDQIDPSLCRLKVGKEMFTTLGTNFVKQLQERKFDVFLDLKFHDIPNTVARAVRSAADLGVWMVDLHASGGLRMMEEAKNILEPYGKDAPILIGVTVLTSMEDLDLLQIGINASPMEQVIRLAHLTQRAGLDGVVCSPQEVEILRKNLGSDFKLVTPGIRPVGSEFGDQRRVMTPSAAVRSGADYLVIGRPITQAENPAEVLRSINASLANI

SEQ ID NO: 156002 - DNA, 699 bp, Pseudomonas aeruginosa PA7
  CDS (1)..(699): transl_table=11
atgtccgcctgccagtcccccatcatcgtcgccctggatttccccacccgtgaggccgccctggcgctggccgatcagctggatccgaaactgtgccgggtgaaggtcggcaaggaactcttcaccagctgcgccgcgggcatcgtcgagatcctgcgcgacaagggcttcgaggtattcctcgacctgaaattccatgacatcccgaacaccaccgcgatggcggtgaaggccgccgccgagatgggcgtgtggatggtcaacgtgcactgttccggcggcctgcgcatgatggccgcctgccgcgagacgctggaggcgttcaacgggccgaagccgctgctgatcggggtcaccgtgctgaccagcatggagcgcgaggacctggccggcatcggcctcgacatcgagccgcaggagcaggtgctgcggctcgccgcgctggcggagaaagccggcatggacggcctggtctgctcggcccaggaagcgccggcgctgaagggcgcccatccgcgcctgcaactggtgaccccgggcatccgcccggccggcagcgcccaggacgaccagcggcgcatcctcaccccgcgccaggccctggacgccggttccgactacctggtgatcggtcgtccgatcagccaggccgccgacccggccaaggcgctggcggcgatcgtcgccgagctgggctga

SEQ ID NO: 156003 - protein, 232 aa, Pseudomonas aeruginosa PA7
MSACQSPIIVALDFPTREAALALADQLDPKLCRVKVGKELFTSCAAGIVEILRDKGFEVFLDLKFHDIPNTTAMAVKAAAEMGVWMVNVHCSGGLRMMAACRETLEAFNGPKPLLIGVTVLTSMEREDLAGIGLDIEPQEQVLRLAALAEKAGMDGLVCSAQEAPALKGAHPRLQLVTPGIRPAGSAQDDQRRILTPRQALDAGSDYLVIGRPISQAADPAKALAAIVAELG

SEQ ID NO: 156004 - DNA, 696 bp, Shewanella baltica OS185
  CDS (1)..(696): transl_table=11
atgacgactaaacctatcctcgtagcgcttgattacgataacaaaaaccacgctttacaactgatagaaaaactcgatcccaacatgtgccgccttaaagtcggcaaagaaatgtttaccctgtttggcccgcaactggtgaaagatatccatgatcgtggctttgatttgttcctcgatttgaaatttcacgatattcccaatactgtcgccaaagccgtggccgctgccgcagagctgggtgtatggatgacgaatgtgcatgccagtggtggtttagccatgatggaagcggccaaaaaggccttgctgccatacggcgacaaagcgcctatgctgatcgctgtgacggtattaacctccatgagtgatgatgatcttaaattactcggtatcaatgtgccagcgtttgagcatgtgcaacgtttagctaagctgacgcagcaagcaggactcgacggcgtggtgtgttcagcccaagaagcaacagcgttaaaatcactgttaggtaaggacttcaaactcgtgacgccggggatccgcccagttggtagtgatgctggcgatcaacaccgggtgatgacgccgcctcaagcgattgcagcgggttcagattacctagtgattggccgtccaatcactaaagccgccgatccgttagcggcattgcaagcgattcaccaatcattggcatag

SEQ ID NO: 156005 - protein, 231 aa, Shewanella baltica OS185
MTTKPILVALDYDNKNHALQLIEKLDPNMCRLKVGKEMFTLFGPQLVKDIHDRGFDLFLDLKFHDIPNTVAKAVAAAAELGVWMTNVHASGGLAMMEAAKKALLPYGDKAPMLIAVTVLTSMSDDDLKLLGINVPAFEHVQRLAKLTQQAGLDGVVCSAQEATALKSLLGKDFKLVTPGIRPVGSDAGDQHRVMTPPQAIAAGSDYLVIGRPITKAADPLAALQAIHQSLA

SEQ ID NO: 156006 - DNA, 714 bp, Anaeromyxobacter sp. Fw109-5
  CDS (1)..(714): transl_table=11
atgggtcgttcacacggaggagccaaccgcatgcagcccaaggaccgcatctgcgccgccatcgactttccgtcctggtccgccgccgagccgttcgcgcgcgcggtggcgcccgaggtcggcatgctcaaggtcggcctggagctgttcgtcgccgagggtccgcccgtggtgcgcgccgccgcggcgctcgggaggcccgtgttcctcgacctgaagctccacgacatccccaacaccgtggagggcgcggcccgctcggcggcggcgagcggcgcgtcgctcctcacggtgcacgcctccgggggcgcggagatggtccgcgccgccgtgcgcggcgcgggcccgggcgtgcgggtgctcgcggtgacggtgctcacgagcctcgacgcggccgcgctcgacgcgatcggcctcgccggtccgcccgaggacgcggtggtgcggctcgcgaggctcgcggtcggggccggtgccggcggcatcgtctgctccccgcacgaggtcgccgccgtccgcgcggcggtcggcgccggcccgctcctcgtcatccccggcgtgcgccccgcgggcgccgcgaagggcgatcaggcccgcgtcgcgacgcccgccgaggcggtgcgctccggcgcggacgtgctcgtcatcggccgccccctgcgcgagggtggcgatcccggcgccgcggcgcgggcgatcgcggggacgctgtag

SEQ ID NO: 156007 - protein, 237 aa, Anaeromyxobacter sp. Fw109-5
MGRSHGGANRMQPKDRICAAIDFPSWSAAEPFARAVAPEVGMLKVGLELFVAEGPPVVRAAAALGRPVFLDLKLHDIPNTVEGAARSAAASGASLLTVHASGGAEMVRAAVRGAGPGVRVLAVTVLTSLDAAALDAIGLAGPPEDAVVRLARLAVGAGAGGIVCSPHEVAAVRAAVGAGPLLVIPGVRPAGAAKGDQARVATPAEAVRSGADVLVIGRPLREGGDPGAAARAIAGTL

SEQ ID NO: 156008 - DNA, 702 bp, Parvibaculum lavamentivorans DS-1
  CDS (1)..(702): transl_table=11
atgaaactcgaaaaccccatattctgtgcgttggacacgaccgatatcggccgtgcggtggcgcttgcgcgcgatctgaaggggagcgtgggcggcgcgaagctgggcatggagtttttcaacgcgcacgggcctgagggttaccgggctgtcgcggagaccgggctgccgatctttctcgatctcaagcttcacgacatcccgaataccgtcgcgggaggcatccgcgcagtgctgccgctgcggccggccatcgtcaatgtccatgcggcaggcggcgccgcgatgatgcgcgcggcggcggatgcggcaagggaggccggtgatgcgcggcccctcctcatcgccgttaccctgctgacgagcctcgatgcctcggaccttgcggataccggcgtcacgggaagcccaagcgaccatgtgcgccggctggcggcgcttgctgcaggagcggggctcgacggcgtggtctgttccgcacatgaaattgaagcgctcaggcgcgacctgggaccggacttcaagctcgtggtgcccggtatcaggcccgagaagagcgatgtcggcgaccagaagcgcgtgatgacgccctcgcaggctcttgcgtccggagccgatgtactggtgatcggccgtccgatcacgggtgccggtgatccgcgagcagctgcggacgagatcaatcgctcgctcgccgcgtga

SEQ ID NO: 156009 - protein, 233 aa, Parvibaculum lavamentivorans DS-1
MKLENPIFCALDTTDIGRAVALARDLKGSVGGAKLGMEFFNAHGPEGYRAVAETGLPIFLDLKLHDIPNTVAGGIRAVLPLRPAIVNVHAAGGAAMMRAAADAAREAGDARPLLIAVTLLTSLDASDLADTGVTGSPSDHVRRLAALAAGAGLDGVVCSAHEIEALRRDLGPDFKLVVPGIRPEKSDVGDQKRVMTPSQALASGADVLVIGRPITGAGDPRAAADEINRSLAA

SEQ ID NO: 156010 - DNA, 705 bp, Xanthobacter autotrophicus Py2
  CDS (1)..(705): transl_table=11
atgagccttgtcgatgcgaaagtccgcgaccgcatgatcgtggcgctcgactatcccaacgtgagcgcggccgaggccctggtctggcagctcggcgacgtggtgaccttctacaagatcggcctggagctctccatcgcgggggggctcgaccttgccgccgacctcatcggcgccggcaagaaggtgttcctcgatctcaagctgcacgacatcggcaatacggtggagcgggcgaccgaggcggcggcggcgcgcggggtgcacatcctcaccgtccatgcctatccgcagaccatggcggcggcggcgcggggggccaagggcagcccgctcgaagtgctgggcgtgaccgtgctcacctcctatgacgacgcggacctcgccaccgccggctatcgcatgggggtgaccgacacggtccgcctgcgcgccgggcaggctctggaggcagggatcgcgggggtcatctgcgcgcccacggatgcggccatggtgcgcgccatcctggggccggatcgccgggtggtgacgcccggggtgcggccgaagggggcggacgtgggtgaccagaagcgcatcgccaccccggctgaagccatcgccgcgggcgccgaccgcatcgtggtgggccgcccggtgacggcggccgcggacccggtggcggcggccgaggccatcctggcggaactggcgggggcctga

SEQ ID NO: 156011 - protein, 234 aa, Xanthobacter autotrophicus Py2
MSLVDAKVRDRMIVALDYPNVSAAEALVWQLGDVVTFYKIGLELSIAGGLDLAADLIGAGKKVFLDLKLHDIGNTVERATEAAAARGVHILTVHAYPQTMAAAARGAKGSPLEVLGVTVLTSYDDADLATAGYRMGVTDTVRLRAGQALEAGIAGVICAPTDAAMVRAILGPDRRVVTPGVRPKGADVGDQKRIATPAEAIAAGADRIVVGRPVTAAADPVAAAEAILAELAGA

SEQ ID NO: 156012 - DNA, 792 bp, Cronobacter sakazakii ATCC BAA-894
  CDS (1)..(792): transl_table=11
atgcttgccgtttatcaatcccgcgccacgccggtgcgcctgtcagaaggtctggtcatgacatcaattgcctcatcctctcattctgtaacccattctcctgtcgttgttgcgcttgattacgacaatcgcgacagcgcgctggcctttgtggacggcatcgatccgcgcgactgccgcctgaaagtcggcaaagagatgttcacgctgtttggaccgcaactggtgcgtgatttgattacgcgcggttttgacgtctttctggaccttaaatttcacgatattccgaacaccactgcgcgtgccgttgctgccgcggcggagcttggcgtctggatggtgaacgttcacgcgggtggcggtgcgcgcatgatgacggcggcgaaagaggcgctcgcgccctttggcaaggacgcgccgttactgattgcggtgacggttctgaccagtatggaagccgaggatctgcaagggcttggtattaccctcagcccggcagagcaggcggagcgtcttgcgcgtctgactcagcagtgtggtctggatggcgtggtctgctctgcgcaggaggcggtgcgctttaaagcggcgttcgggcacgaatttaaactggtcacgcccggcattcgtccggcggggagcgaggctggcgatcagcgccgtattatgacgcccgctgaagcacaacaggcgggcgtggactatatggtcatcggacggcccatcacccgcgcggttaacccggcacaggcgctgcgcgatattctggcgtctctgaagcaggagggataa

SEQ ID NO: 156013 - protein, 263 aa, Cronobacter sakazakii ATCC BAA-894
MLAVYQSRATPVRLSEGLVMTSIASSSHSVTHSPVVVALDYDNRDSALAFVDGIDPRDCRLKVGKEMFTLFGPQLVRDLITRGFDVFLDLKFHDIPNTTARAVAAAAELGVWMVNVHAGGGARMMTAAKEALAPFGKDAPLLIAVTVLTSMEAEDLQGLGITLSPAEQAERLARLTQQCGLDGVVCSAQEAVRFKAAFGHEFKLVTPGIRPAGSEAGDQRRIMTPAEAQQAGVDYMVIGRPITRAVNPAQALRDILASLKQEG

SEQ ID NO: 156014 - DNA, 702 bp, Vibrio harveyi ATCC BAA-1116
  CDS (1)..(702): transl_table=11
atgatcgaccaaaaagttattgtcgcactggattatgataaccaagcggatgcacttgcatttgtagatagaattgatcctgcgtcatgtcgcctaaaagtaggcaaggaaatgtttacgctatttggtcctgatttcgtacgtgagcttcataaacgtggtttctctgtattcctagacctgaagtttcacgatatcccgaatacgtgttcaaaagcagttcgcgctgcggctgagctaggtgtatggatggtgaacgttcacgcgagtggtggtgaacgtatgatgacggcatctcgtgagattcttgaaccttacggtaaagaccgtccactgctgatcggcgtgactgtgcttacaagcatggagcaaagtgatttggcaggtattggcttggacgttgcgcctcaagagcaagtgattcgtctagctacgctgacaaagaattcaggtcttgatggcgtagtctgttctgctcaagagtcatcacttctgaagaatgaacttggcaaagagtttaagctagtaactccgggtattcgccctgcgggttcagagcaaggcgatcaacgccgcatcatgacgccagtcgatgcgatccaagcgggatcagactatctggttattggccgtcctattactcaggcggcggatcctgcatcggttcttaagtcaatcaacgatagcttagcaagcatgtaa

SEQ ID NO: 156015 - protein, 233 aa, Vibrio harveyi ATCC BAA-1116
MIDQKVIVALDYDNQADALAFVDRIDPASCRLKVGKEMFTLFGPDFVRELHKRGFSVFLDLKFHDIPNTCSKAVRAAAELGVWMVNVHASGGERMMTASREILEPYGKDRPLLIGVTVLTSMEQSDLAGIGLDVAPQEQVIRLATLTKNSGLDGVVCSAQESSLLKNELGKEFKLVTPGIRPAGSEQGDQRRIMTPVDAIQAGSDYLVIGRPITQAADPASVLKSINDSLASM

SEQ ID NO: 156016 - DNA, 798 bp, Citrobacter koseri ATCC BAA-895
  CDS (1)..(798): transl_table=11
atgcacgccgtttacccatttcgcgccgcacccggtgcccatcatcaagaaggtctggtcatgacgtttactgcttcatcttcttcccgcgctgttaccgattctcctgtcgttgttgctctggattacaataatcgtgataacgcgctggctttcgtcgacagaatcgatccgcgtgattgccgcctgaaagtcggcaaagagatgttcacgctgttcggcccgcagttggttcgtgatttgcagcagcgcggcttcgatatctttcttgacctgaaatttcatgatattccaaataccacggcgcatgccgttgcggcggcggcagatctgggcgtatggatggttaacgtccatgcgtcgggtggggcgcgaatgatgaccgcagcgcgcgaagccttactgccgctgggtaaggatgcgccattgctgattgctgtgacggtactgaccagcatggaagccagcgatctggcggatcttggcgtgacgttgtcaccggctgatcatgcggaacgtctggcacgcctgacgcaaaattgcgggctggatggcgtggtctgctcggcgcaggaagcggtgcgctttaagcaggaatttggcacagagtttaagctggtaacgccgggtatccgccctcagggatctgacgctggcgatcagcgccgtatcatgacgccggaacaggcgctggcggcgggcgtggactatatggttataggacgaccggttacgcagtctgctgaccctgcgcaaaccctgaaggccattaatgcatcactgaaacggggagcctga

SEQ ID NO: 156017 - protein, 265 aa, Citrobacter koseri ATCC BAA-895
MHAVYPFRAAPGAHHQEGLVMTFTASSSSRAVTDSPVVVALDYNNRDNALAFVDRIDPRDCRLKVGKEMFTLFGPQLVRDLQQRGFDIFLDLKFHDIPNTTAHAVAAAADLGVWMVNVHASGGARMMTAAREALLPLGKDAPLLIAVTVLTSMEASDLADLGVTLSPADHAERLARLTQNCGLDGVVCSAQEAVRFKQEFGTEFKLVTPGIRPQGSDAGDQRRIMTPEQALAAGVDYMVIGRPVTQSADPAQTLKAINASLKRGA

SEQ ID NO: 156018 - DNA, 756 bp, Serratia proteamaculans 568
  CDS (1)..(756): transl_table=11
atgtccattttacagaaggtagaagaaatgaagtctgaaaataacattaataacaatgacttaaaatcatctccgatcattgttgcgcttgattacgcagatattggcgcagcattggcatttgccgatcgtatcagtccgcaggactgccggctaaaagtgggcaaggaaatgttcaccctgtttggaccacaattggtgcgcgacttgcacgcccgcggtttcgatgtatttctggatttgaaatttcacgatattcccaacaccaccgcccgtgcggtagcggcggcggctgaactgggcgtgtggatggttaacgttcacgccagcggcggtgcgcggatgatgaccgcagccaaagaggcgttgctgccttatggcgcgcaggcgccgttgttgattgccgtgaccgtgcttaccagcatggaggcggaggatttgcaggctatcggtatcgacctctctccggccgaacaggcggaacgactggcgcgtctgacccgcgattgtggactggacggcgtagtctgttctgcgcatgaggccgaacgcctgaaagcggcctgtggccagcagttccagttggtgacaccaggtatccgtccggaaggcagcgatgccggcgatcagcgccgtattatgacgccggtgcaggcacaggcggccggtgttgactatatggtgattgggcgcccgatcacccaatctgccgatcctgccgctacgctgagcgccattcgcgcttcactggcctga

SEQ ID NO: 156019 - protein, 251 aa, Serratia proteamaculans 568
MSILQKVEEMKSENNINNNDLKSSPIIVALDYADIGAALAFADRISPQDCRLKVGKEMFTLFGPQLVRDLHARGFDVFLDLKFHDIPNTTARAVAAAAELGVWMVNVHASGGARMMTAAKEALLPYGAQAPLLIAVTVLTSMEAEDLQAIGIDLSPAEQAERLARLTRDCGLDGVVCSAHEAERLKAACGQQFQLVTPGIRPEGSDAGDQRRIMTPVQAQAAGVDYMVIGRPITQSADPAATLSAIRASLA

SEQ ID NO: 156020 - DNA, 696 bp, Shewanella pealeana ATCC 700345
  CDS (1)..(696): transl_table=11
atgactgacaagcctattttagttgccctagactatgataataaaaatgatgctttgcagcttattgatcaattagatccagagatgtgtcgattaaaagtcggcaaagagatgttcactttgtttgggccgcaattagtcacagatatccacaaccgcggatttgaattgttccttgatcttaaattccacgatatcccgaatacggtagctaaagcggttgcagcagctgcagagctgggcgtttggatgacaaatatccatgcaactggtggtctggcaatgatggaagcggctaagcgtgctcttgagccatacggcgataaagctccgttactgatcgcagtaacagtgctgacatctatgagcgacgacgaacttaagctactgggtattaatgtaccggcatctgaacatgtattgcgtttagctgccctgactaaacaagcaggcctagatggtgttgtttgttcagctcaggaatctgcacttttgaaagccaaatttggtcaagattttaagctgattacgccaggtatacgtcctgaaggcagtgacaaaggtgatcagcaccgcgtaatgacgccatcacaagcgttaactgcaggttcagattacttggtgattggccgcccaattaccaaagcggctgacccattaaaagcattacaggcgatacaccaaacgattgcttaa

SEQ ID NO: 156021 - protein, 231 aa, Shewanella pealeana ATCC 700345
MTDKPILVALDYDNKNDALQLIDQLDPEMCRLKVGKEMFTLFGPQLVTDIHNRGFELFLDLKFHDIPNTVAKAVAAAAELGVWMTNIHATGGLAMMEAAKRALEPYGDKAPLLIAVTVLTSMSDDELKLLGINVPASEHVLRLAALTKQAGLDGVVCSAQESALLKAKFGQDFKLITPGIRPEGSDKGDQHRVMTPSQALTAGSDYLVIGRPITKAADPLKALQAIHQTIA

SEQ ID NO: 156022 - DNA, 723 bp, Acaryochloris marina MBIC11017
  CDS (1)..(723): transl_table=11
atgacgactgagattgctcaacgaattattgtgccgttagatgtgccttcagaggcagatgcgatcgcattgatcgatcagattccccaagttcaattttggaaagtcggtttagagctgtttgtgagctgtggccccagtatcttagagcagcttaaacagcgccaaaaaaaggtttttctcgatctaaaatttcacgatattcccaatactgtggctggtgcttgccggtctgctgccacttatggcgtggatctactcacgattcatgccacagcaggtcgtcctgccctctctgctgcgcaacaggctttacaagaaggcgctcaatcggctcaaacggctcctccgaagttgattgcgattacagtattgaccagtctctctctccgcgagctggccttggacttaaaaatacccctggaacttcccgagtatgccttgcaaatgggtctgttggctcaagagtcaggtctaaatgggatcgtctgttcgcctcacgaagcagaacaaatgcgtcaggtatgcggggatgaatttctcatcgtttgtccaggcgtgcgccctccaggatcagtgacaggtgatcaaaaacgggctatgacacccactgcagccatgcaagcaggggccaactatttggtcattggtcgcccgatcacgactgctactgatcctcaacaggcctttcaacagatctgtaccgatttagttagcgcttga

SEQ ID NO: 156023 - protein, 240 aa, Acaryochloris marina MBIC11017
MTTEIAQRIIVPLDVPSEADAIALIDQIPQVQFWKVGLELFVSCGPSILEQLKQRQKKVFLDLKFHDIPNTVAGACRSAATYGVDLLTIHATAGRPALSAAQQALQEGAQSAQTAPPKLIAITVLTSLSLRELALDLKIPLELPEYALQMGLLAQESGLNGIVCSPHEAEQMRQVCGDEFLIVCPGVRPPGSVTGDQKRAMTPTAAMQAGANYLVIGRPITTATDPQQAFQQICTDLVSA

SEQ ID NO: 156024 - DNA, 696 bp, Shewanella baltica OS195
  CDS (1)..(696): transl_table=11
atgacgactaaacctatcctcgtagcgcttgattacgataacaaaaaccacgctttacaactgatagaaaaactcgatcccaacatgtgccgccttaaagtcggcaaagaaatgtttaccctgtttggcccgcaactggtgaaagatatccatgaacgtggctttgatttgttcctcgatttgaaatttcacgatattcccaatactgtcgccaaagccgtggccgctgccgcagagctgggtgtatggatgacgaacgtccatgccagtggtggtttagccatgatggaagcggccaaaaaggccttgctgccatacggcgacaatgcgcctatgctgatcgctgtgacggtattaacctccatgagtgatgatgatcttaaattactcggcatcaatgtgcctgcgtttgagcatgtgcaacgtttagctaagctgacccagcaagcaggactcgacggcgtggtgtgttcagcccaagaagcaacagcgttaaaatcactgttaggtaaggacttcaaactcgtgacgccggggatccgcccagttggtagtgatgctggcgatcaacaccgggtgatgacgccgcctcaagcgattgcagcgggttcagattacctagtgattggccgtccaatcactaaagccgccgatccgttagcggcattgcaagcgattcaccaatcattggcatag

SEQ ID NO: 156025 - protein, 231 aa, Shewanella baltica OS195
MTTKPILVALDYDNKNHALQLIEKLDPNMCRLKVGKEMFTLFGPQLVKDIHERGFDLFLDLKFHDIPNTVAKAVAAAAELGVWMTNVHASGGLAMMEAAKKALLPYGDNAPMLIAVTVLTSMSDDDLKLLGINVPAFEHVQRLAKLTQQAGLDGVVCSAQEATALKSLLGKDFKLVTPGIRPVGSDAGDQHRVMTPPQAIAAGSDYLVIGRPITKAADPLAALQAIHQSLA

SEQ ID NO: 156026 - DNA, 798 bp, Salmonella enterica subsp. arizonae serovar 62:z4,z23:--
  CDS (1)..(798): transl_table=11
atgcacgccgtttacccaatttgcgccacttccggtgcccatcatcaagaaggtctggtcatgacgtttacagcttcatcttcttcccgcgctattactgaatcgccagttgttgtagcgctggattaccatgaacgcgaaaaagcccttgcgtttgtcgacaaaatcgatccttgcgattgtcgtttaaaagtgggcaaagaaatgttcacgctgtttggcccactgtttgttcgggatctacagcaacgtgggtttgatgtctttcttgatctaaaatttcatgatattcctaacacaacggccagggccgtttccgctgcggcagacctgggcgtctggatggtaaacgttcatgcgtcgggcggggcgagaatgatgaccgcagcgcgcgacgcgttggcgccgttcggtaaagatgcgccgttgctcatcgcggtgacagtgttgaccagtatgggaaccagcgatctgcgcgatcttggcgtgacgttgtcaccagtggaacatgcggagcggctggcacgcctgacgcagcaatgcggtctggatggcgtggtctgttctgctcgggaggctgtcggatttaaacaggtttttggcgctgcatttaagctggtgacgccgggcattcggcctgcaggtagcgaggcggacgaccagcgacgcattatgacgcccgagcaggcattatccgcaggcgtcgactacatggtgattggccgtccgattacacaatcggtaaacccggcgcaaacgctgaaggagatcaacgcgtcactgaaacgggaggcataa

SEQ ID NO: 156027 - protein, 265 aa, Salmonella enterica subsp. arizonae serovar 62:z4,z23:--
MHAVYPICATSGAHHQEGLVMTFTASSSSRAITESPVVVALDYHEREKALAFVDKIDPCDCRLKVGKEMFTLFGPLFVRDLQQRGFDVFLDLKFHDIPNTTARAVSAAADLGVWMVNVHASGGARMMTAARDALAPFGKDAPLLIAVTVLTSMGTSDLRDLGVTLSPVEHAERLARLTQQCGLDGVVCSAREAVGFKQVFGAAFKLVTPGIRPAGSEADDQRRIMTPEQALSAGVDYMVIGRPITQSVNPAQTLKEINASLKREA

SEQ ID NO: 156028 - DNA, 729 bp, Chloroflexus aurantiacus J-10-fl
  CDS (1)..(729): transl_table=11
atgagtctcgcgccacgcgaacggatactggttgcgctcgatacacccgatctggatgcagcagttgctttagcaacccggttgcgcgggcaggttggcggctataaagtcggcctggaaatctgctctgcggtcggcgtaccccagattgtatccgccatgactgcggttggcggaagtgtctttctcgatctcaaactgcacgacattccgaacacggtcgccggtgcagtccgcgccgtctgcaacctcggcccggcagtccagatgttgacactccactgtagtggaggtagcgcaatgctccgcgccgcagtcaatgcagcccaaagcatgccctaccgtccactgctgttgggcgttaccgtgctcaccagtctcgatgccacagcactcgccggcgaactgcgtgtcacgtcggacatcaccgactacgtagttcatctggctcgcatggcgcaggattgtggtctcgacggcgtggtagcttcgccgcacgaagtgagtgccattcgtactgcctgccctcacgtgcggatagtcacccccggtattcgcccacagtgggccgcagaaggtgaccagcgtcgcgtcatgacaccggcagccgccctacgcgctggtgccgactatctggtcatcggacgaccaattactgcgccaccggcaatcatcggcgatccggtcaccgcagtcgcacggattcttgcagaattggaacaggaatga

SEQ ID NO: 156029 - protein, 242 aa, Chloroflexus aurantiacus J-10-fl
MSLAPRERILVALDTPDLDAAVALATRLRGQVGGYKVGLEICSAVGVPQIVSAMTAVGGSVFLDLKLHDIPNTVAGAVRAVCNLGPAVQMLTLHCSGGSAMLRAAVNAAQSMPYRPLLLGVTVLTSLDATALAGELRVTSDITDYVVHLARMAQDCGLDGVVASPHEVSAIRTACPHVRIVTPGIRPQWAAEGDQRRVMTPAAALRAGADYLVIGRPITAPPAIIGDPVTAVARILAELEQE

SEQ ID NO: 156030 - DNA, 702 bp, Microcystis aeruginosa NIES-843
  CDS (1)..(702): transl_table=11
atgaccaactcagaccgaattattgttcctctcgatgtgccggatttagaatcagcgatcgcactgcttgatctgttgccggaagtcaatttttggaaagtgggactagaattatttgtcagtagcggtgcagaaattctagggattctgcaagaaagacaaaaaaagagctttctcgatttaaaatttcatgatattcccaatacggtcgctggggcctgtcgttcagctagtcgctatcaagtggatttactcaccctgcacgctacggccggacggcaagcactgacggcggctaagggggcaatctctgacctgctatcgccgccaaaacttctcgctatcaccgttttaaccagccttaacgcccgcgaattagccctcgacctcaaaattcccctagaactatcggaatatgccttaaatctggcattattgggcaaggaatcgggaattgatggggcggtttgttctccccaagaagtggcgcaattgcgtcgcgtctgtggagaggattttctcttagtttgccccggagttcgtccctcctggtcaagcaaaggggatcaaagtcgggtgatgactccggcccaagcgcttaaagctggggctgattatctagtaattggacgaccgatcaccggtgccgaggagccaaaggtagcatgggcaaaaatttgtcaagaattagccgatatttag

SEQ ID NO: 156031 - protein, 233 aa, Microcystis aeruginosa NIES-843
MTNSDRIIVPLDVPDLESAIALLDLLPEVNFWKVGLELFVSSGAEILGILQERQKKSFLDLKFHDIPNTVAGACRSASRYQVDLLTLHATAGRQALTAAKGAISDLLSPPKLLAITVLTSLNARELALDLKIPLELSEYALNLALLGKESGIDGAVCSPQEVAQLRRVCGEDFLLVCPGVRPSWSSKGDQSRVMTPAQALKAGADYLVIGRPITGAEEPKVAWAKICQELADI

SEQ ID NO: 156032 - DNA, 702 bp, Pseudomonas putida GB-1
  CDS (1)..(702): transl_table=11
atgtccgcctgccagacgcccctgatcgtcgccctggatttccctacccgtgaggccgccctgaagctggctgaccagcttgaccctgcgctgtgccgggtaaaggttggcaaggagctgtttaccagcagcgcttcgggcattgtcgaaaccctgtgcgacaagggcttcgaagtgttcctcgacctgaagttccacgacatccccaacaccaccgccatggcggtaaaggccgccgccgagatgggtgtgtggatggtcaacgtgcattgctccggtggcctgcgcatgatggctgcctgccgcgaagagctggccaagcgcagcggcccgcagccgttgctgattggcgtgaccgtgctgaccagcatggaacgcgaagacctggctggcattggcctggacgtcgacccgcaggagcaggtgctgcgcctggcggcactggcgcaaaaggccggcatggacggtttggtgtgctcggcgcttgaggcccccgcgctgaaggcggcgcacccgtcgctgcaactggtgaccccgggcattcgcccggcgggtagcgcgcaggatgaccagcgccgtattctcactccgcgccaggcactggatgcgggttcggattacctggtgatcggccggccgatcagccaggcagccgacccagcgcaagcgctggcggcggtggtggcggagattcgtgggtaa

SEQ ID NO: 156033 - protein, 233 aa, Pseudomonas putida GB-1
MSACQTPLIVALDFPTREAALKLADQLDPALCRVKVGKELFTSSASGIVETLCDKGFEVFLDLKFHDIPNTTAMAVKAAAEMGVWMVNVHCSGGLRMMAACREELAKRSGPQPLLIGVTVLTSMEREDLAGIGLDVDPQEQVLRLAALAQKAGMDGLVCSALEAPALKAAHPSLQLVTPGIRPAGSAQDDQRRILTPRQALDAGSDYLVIGRPISQAADPAQALAAVVAEIRG

SEQ ID NO: 156034 - DNA, 696 bp, Shewanella halifaxensis HAW-EB4
  CDS (1)..(696): transl_table=11
atgactgacaagcctattttagttgccctagactatgataataaaaatgatgctttgcagcttatcgatcaattagaccctgatatgtgtcgactaaaagttggcaaagagatgtttactctgtttggcccgcaattggttaccgatattcatagccgtgggtttgatctgttcctagatcttaagttccacgatatcccaaatactgtcgctaaagcggtagccgccgccgcagaactaggcgtttggatgacgaatatccatgcctctggcgggctagccatgatggaagccgctaagcgcgcactcgagccatacggggacaaagcgcctttgcttatcgctgttactgtattaacctcaatgagcgatgaagagcttaagttacttggcatcaatgtcccagcctcggagcatgtgttaagacttgcggcgctgactaaacaagcaggccttgatggggttgtctgttctgcgcaggaatcaagcttattaaaagctaagttcggtcaagacttcaaactcatcacacctggtattcgcccagcaggctctgacaaaggcgatcaacaccgagtgatgacacccgctgaagcgcttgctgcgggttctgattatttagtaattggacgtccaattacaaaagctgcagatccgctaaaggcattacaagcaatccatcaaacgattgcataa

SEQ ID NO: 156035 - protein, 231 aa, Shewanella halifaxensis HAW-EB4
MTDKPILVALDYDNKNDALQLIDQLDPDMCRLKVGKEMFTLFGPQLVTDIHSRGFDLFLDLKFHDIPNTVAKAVAAAAELGVWMTNIHASGGLAMMEAAKRALEPYGDKAPLLIAVTVLTSMSDEELKLLGINVPASEHVLRLAALTKQAGLDGVVCSAQESSLLKAKFGQDFKLITPGIRPAGSDKGDQHRVMTPAEALAAGSDYLVIGRPITKAADPLKALQAIHQTIA

SEQ ID NO: 156036 - DNA, 705 bp, Lysinibacillus sphaericus C3-41
  CDS (1)..(705): transl_table=11
atgaatactaagcctatactagcattagattttccaggagaaaaagaagtattcgatttcttaaagcacttccatgagcctcttttcgtgaaaattggaatggaattatatatgcaagaagggcctgatattgtacgcaaagtaaaagagttaggtcatgatgttttccttgatttaaaactacatgatatcccgaatacagtattctctgctatgaagggcttagccaaactaggagtgaatttagtaaatgtccatgcggcaggtggacgtccaatgatggaggctgccctagagggtctagaagcaggaacacctgtaggcaaagaacgtccagcattaattgctgtaacacaattaacatccacaacagaggagcaaatgcagacggagcaaagaattgctttatccttacaggagtctgttctacattatgcacgtctaacaaaacaagctgccttacagggtgtcgtttgttcggtacatgaggctaaggcaatagctgaagtgtgtggagaggattttcttcgggtaacaccaggaattcgtctagccggtggcgctgcacacgatcaaaaacgtattgccacaccggatggagcaaaacgtgaaggttcgtcactcatcgttgttggacgtgctgtaacaggtgcacaggatccagtagcggcatataaaatcgtaagtgaattatgggaggcataa

SEQ ID NO: 156037 - protein, 234 aa, Lysinibacillus sphaericus C3-41
MNTKPILALDFPGEKEVFDFLKHFHEPLFVKIGMELYMQEGPDIVRKVKELGHDVFLDLKLHDIPNTVFSAMKGLAKLGVNLVNVHAAGGRPMMEAALEGLEAGTPVGKERPALIAVTQLTSTTEEQMQTEQRIALSLQESVLHYARLTKQAALQGVVCSVHEAKAIAEVCGEDFLRVTPGIRLAGGAAHDQKRIATPDGAKREGSSLIVVGRAVTGAQDPVAAYKIVSELWEA

SEQ ID NO: 156038 - DNA, 750 bp, Candidatus Desulforudis audaxviator MP104C
  CDS (1)..(750): transl_table=11
atgccggcaccggaggtacccgctgaagcgggtcagcggattctggtagcgttggacgtggacgagcgggagcgggctctgactctggcccgggaactccggggcgaggtgggcggcttcaagatcggcatgcggctctttttccgccacggcccgcggatggtggaggaattggccggtgtgggcggccggttgtttctggacctgaaactgcacgacatccccgaaacggtggcccagggggtgcgggccctggtgggcctgggggcgcacatcattaacgtccacgccgccgggggcttggtcatgatgcgggcggcggccgaggcggcccgtacggaagcggcgcgcgccggggtcccggctccgaagctcgtggccgttaccgtgctgaccagcctggaacaggaaaacttaagccgggagttgggcttcggagacgacctggagtccgtcgtgctcgcctgggccggactggccaaggccgccggcctggacggcgtggtgtcctcgccgctggaactgacggcgctccgcgccgcactggggccggacttcctgctgatcaccccgggaatccgcccggcgggcgcccagctacaggaccagaagcgggtcatgaccccggcccaggccgtgcgcgccggcgccgactacctggtgatcggccgccccattaccgcggccccggaccccgtggccgccgcgcgggccatcgtccgggaactgccggcgagcgaggcgggctga

SEQ ID NO: 156039 - protein, 249 aa, Candidatus Desulforudis audaxviator MP104C
MPAPEVPAEAGQRILVALDVDERERALTLARELRGEVGGFKIGMRLFFRHGPRMVEELAGVGGRLFLDLKLHDIPETVAQGVRALVGLGAHIINVHAAGGLVMMRAAAEAARTEAARAGVPAPKLVAVTVLTSLEQENLSRELGFGDDLESVVLAWAGLAKAAGLDGVVSSPLELTALRAALGPDFLLITPGIRPAGAQLQDQKRVMTPAQAVRAGADYLVIGRPITAAPDPVAAARAIVRELPASEAG

SEQ ID NO: 156040 - DNA, 738 bp, Yersinia pseudotuberculosis YPIII
  CDS (1)..(738): transl_table=11
atgacgtccgcaactaaaactaataacagtggctcaatatcctccccaattgttgttgcgttggattatgccaataaagacgctgcgttagcctttgctgatcaggttagtccacaggattgccggttaaaagtgggcaaagagatgtttacgttgtacggccccgagcttatccgtgacttacatcagcgcggctttgacgtatttcttgatttgaaattccatgacatccctaatactaccgcgcgtgccgtggctgcggcagcagagttgggggtctggatggtcaatgttcatgccagtggcggtgcccgcatgatgtcggcggcgaaagaagccttgttgccttatggtgcacaagcccccttactgattgccgttactgtactgaccagcatggatggcgaagatctgcgggatatcggtattactatcagtccggctgagcaggccgagcggttagcgaaactgacctgggattgcggtttggatggcgtggtgtgctcggctcatgaagcggtgcgtttgaagcaagtttgtggcgaagacttctcgctcgtcaccccaggtattcgcccgcaaggcagtgaagccggtgaccagcggcggatcatgacacctgaacaggcggtagccgcaggtgttgattacatggtaatcggtcgcccaattacacaatctcctgatccggaaaaaacgctgcgcgaaatattggcatcactgacgaaggtggcataa

SEQ ID NO: 156041 - protein, 245 aa, Yersinia pseudotuberculosis YPIII
MTSATKTNNSGSISSPIVVALDYANKDAALAFADQVSPQDCRLKVGKEMFTLYGPELIRDLHQRGFDVFLDLKFHDIPNTTARAVAAAAELGVWMVNVHASGGARMMSAAKEALLPYGAQAPLLIAVTVLTSMDGEDLRDIGITISPAEQAERLAKLTWDCGLDGVVCSAHEAVRLKQVCGEDFSLVTPGIRPQGSEAGDQRRIMTPEQAVAAGVDYMVIGRPITQSPDPEKTLREILASLTKVA

SEQ ID NO: 156042 - DNA, 699 bp, Leuconostoc citreum KM20
  CDS (1)..(699): transl_table=11
atgcagcaagaaccagtatttattgcgttagactttccagatgcctttgctgtcagaaaatttttgaaacaatttgacagtttgactgataagccagctttaaaagtcggtatggaacttttctatgcagaaggaccaacatttgttaatgagttacgccagcaagggtacacaatctttttggacctaaagctttatgatataccacatacggtcggtcgagcagttgcaagcatttcaaaattagatattcaatatttaacgattcatgcttcaggtggtgcacgtatgatggcggcggcagtagctaataagcctgatagcatgaagttgctggccgtgactcaattgacttctttttcagagtcggaaatgcaagcaacacagttgacacaggcaagtttagttgatacagtgacccatttagctgctatggcttttcaggtgggcgttgacggtacgattagttcacctgaagaggccaaagctattcaggcagtaacgagtcagtcatttgtacgaattacaccaggtattcgtctgctaggcgatgataatggtgatcaaagacgtgttacaacaccacaaaaagcgcgtcaccatggcgcgactggcttagttgtgggccgatcaattacgcaagcggtatcaccactagaagcctaccaacgtgttttacaagaatggtgtaaggactaa

SEQ ID NO: 156043 - protein, 232 aa, Leuconostoc citreum KM20
MQQEPVFIALDFPDAFAVRKFLKQFDSLTDKPALKVGMELFYAEGPTFVNELRQQGYTIFLDLKLYDIPHTVGRAVASISKLDIQYLTIHASGGARMMAAAVANKPDSMKLLAVTQLTSFSESEMQATQLTQASLVDTVTHLAAMAFQVGVDGTISSPEEAKAIQAVTSQSFVRITPGIRLLGDDNGDQRRVTTPQKARHHGATGLVVGRSITQAVSPLEAYQRVLQEWCKD

SEQ ID NO: 156044 - DNA, 690 bp, Synechococcus sp. PCC 7002
  CDS (1)..(690): transl_table=11
atgcaagatactgtgattgtgcccctggatgtgccggatctccctgcggcgatcgccttagtcgagagcttaccggaggtcactttctggaaagtgggcctagaattatttgtcgccactgggccggatattttgcgctacctcaaagaccagggcaaacgcatttttcttgatctcaaattccacgacattcccaataccgttgctggtgcctgccgttcggcgcgggcctatggggtcgatcttctgactatccacggtgctgccggggcgatcgccttaacggctgccaaagaagccctcggagattctccgactaaactaattgcgattaccgtcctcaccagtattagtccagaccagttgcgggacgatttgcaagtggatctgcccctcgatgcctttgcccaacacatggccaacctggcccaaggcgctgggttagatggggcggtgtgttccccccaggaagtggcgatgctgcggcaatgttgcggtcaagatttcaccttggtttgtccaggggtacggcccacctgggctcaatcaggggatcaacagcgggtcatgactccccaggcggcaatccaacagggggcaaatcacctcgtcattggccgaccgatcacccaggccgcagatccccaagcggcttggcagaaaattcaagcagagttggcgatcgcctaa

SEQ ID NO: 156045 - protein, 229 aa, Synechococcus sp. PCC 7002
MQDTVIVPLDVPDLPAAIALVESLPEVTFWKVGLELFVATGPDILRYLKDQGKRIFLDLKFHDIPNTVAGACRSARAYGVDLLTIHGAAGAIALTAAKEALGDSPTKLIAITVLTSISPDQLRDDLQVDLPLDAFAQHMANLAQGAGLDGAVCSPQEVAMLRQCCGQDFTLVCPGVRPTWAQSGDQQRVMTPQAAIQQGANHLVIGRPITQAADPQAAWQKIQAELAIA

SEQ ID NO: 156046 - DNA, 693 bp, Methylobacterium radiotolerans JCM 2831
  CDS (1)..(693): transl_table=11
atgaccgagattgccgacccccgcgaccgcctgatcgtggccctcgacctgccgagcgttcaggcggccgaggcgctgatcgaccggatcggcgacgccgcgaccttctacaagatcggctaccagctcggctacgcgggcggcctcgccctggccgagcggctggcggcccgcggcctcaaggtcttcctcgacctgaagctccacgacatcggcaacaccgtcgaggagggcgtgcgctcggcctcgggctcgggcgccaccttcctcaccgtccacgcctacccgcagaccatgcgggcggcggtccgcgggcggggcgcggggctcaggatcctcgccgtgacggtgctcacctcctacgacgatgccgacgccgcggaggccggctacggtctgccggtggcggagctcgtcgccaagcgcgccgcccaggccgccgagatcggcatcgacggcctcgtctgctcggccgccgaggcgggctcggtccgtcgcatcgtcgggccggacaggctgatcgtcaccccgggcatccgcccggcgggcgccgaggccggcgaccagaagcgggtcatgacgccgggcgatgcccgcagggccgggatcgaccacgtggtggtcggccgcccgatcaccggcgccgccgatccccgcgcggtcgcgcaggcgatcgtggcggacctcgcctga

SEQ ID NO: 156047 - protein, 230 aa, Methylobacterium radiotolerans JCM 2831
MTEIADPRDRLIVALDLPSVQAAEALIDRIGDAATFYKIGYQLGYAGGLALAERLAARGLKVFLDLKLHDIGNTVEEGVRSASGSGATFLTVHAYPQTMRAAVRGRGAGLRILAVTVLTSYDDADAAEAGYGLPVAELVAKRAAQAAEIGIDGLVCSAAEAGSVRRIVGPDRLIVTPGIRPAGAEAGDQKRVMTPGDARRAGIDHVVVGRPITGAADPRAVAQAIVADLA

SEQ ID NO: 156048 - DNA, 702 bp, Shewanella woodyi ATCC 51908
  CDS (1)..(702): transl_table=11
atgagtaacaaaccaattttagtcgccttagattttgatgataaaaacgctgctttgcaattagtcgataagctcgatccaaacatgtgtcgcttaaaagtgggcaaagagatgtttactctttttgggccacaactggtcaaagacattcacagtcgtggcttcgatctctttcttgatctaaaatttcatgatattccaaacacagtagcgaaagccgtttcatcggcagctgagttaggtgtttggatgacaaatattcatgctagtggtggtcttgccatgatggaagcggctaaaaaagcactcgttccatacggtgacgatgcgccattgcttattgctgttactgtgctgacttcgatgagtgatgaggatcttaagctgatcgggattgatgtgccagcttttgagcatgttcaacgacttgctaaattaacgcaaaaagccggcctcgacggtgtggtatgttcagcacatgaagctgagatattaaaagcctctttgggtgattcatttaagttagtcacaccgggtatacgtccagttggcgcagataagggtgatcagcacagaattatgacaccgcctcaagcgattgcagcaggctctgattacttagtcattgggcgacctattacaaaagctgctgatccacttgcagcgctaacggcaattcatcaatcgattcaagtgagttaa

SEQ ID NO: 156049 - protein, 233 aa, Shewanella woodyi ATCC 51908
MSNKPILVALDFDDKNAALQLVDKLDPNMCRLKVGKEMFTLFGPQLVKDIHSRGFDLFLDLKFHDIPNTVAKAVSSAAELGVWMTNIHASGGLAMMEAAKKALVPYGDDAPLLIAVTVLTSMSDEDLKLIGIDVPAFEHVQRLAKLTQKAGLDGVVCSAHEAEILKASLGDSFKLVTPGIRPVGADKGDQHRIMTPPQAIAAGSDYLVIGRPITKAADPLAALTAIHQSIQVS

SEQ ID NO: 156050 - DNA, 717 bp, Cyanothece sp. ATCC 51142
  CDS (1)..(717): transl_table=11
ttgtctaggtacttatcgatgtctgttactgataaaattattgttcccttagatgttcccacagaagcagcggcgatcgctttattggatcgcttgccggatgtgacgttttggaaagtgggattagaattatttgtggccacaggcccaactatcctcaaagaacttaaaaagcgacacaaaaagatttttcttgacctaaaatttcatgatattcccaacaccgtagcaggagcttgtgctagtgcttctgagtatggggttgatttaatgacccttcatgccactgctggaaaaactgccctcaacgcagccaccgaagccattgccaaaagcccctcacccccccaattattagccatcaccctcctcacgagcctcaattcacgggatctggcattcgacctaaaaatccccctagaactccctgaatacgcactacagatggctttacttgctaaagattcaggcattaatggggcggtatgttccccccaggaagtcgcccaactcagacaagtgtgtggtaaggattttgtgttagtctgtcctggggttcgtcctaactgggctaatacaggagatcaacggcgagtgatgactcccaaacaagctctagacgcaggggctgattatttagtgattggtagacccattacaatgtcagatgatcctgttatggcctggaatcgtattattgatgaagttagcacttag

SEQ ID NO: 156051 - protein, 238 aa, Cyanothece sp. ATCC 51142
MSRYLSMSVTDKIIVPLDVPTEAAAIALLDRLPDVTFWKVGLELFVATGPTILKELKKRHKKIFLDLKFHDIPNTVAGACASASEYGVDLMTLHATAGKTALNAATEAIAKSPSPPQLLAITLLTSLNSRDLAFDLKIPLELPEYALQMALLAKDSGINGAVCSPQEVAQLRQVCGKDFVLVCPGVRPNWANTGDQRRVMTPKQALDAGADYLVIGRPITMSDDPVMAWNRIIDEVST

SEQ ID NO: 156052 - DNA, 756 bp, Beijerinckia indica subsp. indica ATCC 9039
  CDS (1)..(756): transl_table=11
atgaacgcaccctcatcctctcccgataagccgctggatccacgcgaccggcttatcgtcgctctcgatgtgaccgatccggcggctgcgcggaccttggtgaatcggctgggcgacagcgtgtctttctacaagatcggtatggaactcgcctatggcggcggtctgccgttcgcgagcgagctgctcaaggaaggcaagaaggtttttctcgacctcaagctgcatgatatcgcgacgaccgtcagcaacgcggtggcgcaggttgcgcggctcggcgtgcattttctgacggttcatgcttatccgcaaacgcttgatgccgcgcggcgtggtgccgttggctcgcccttgaaaatcctcggcgtcagtgtgctcacctcttatgatgacgccgatctcgccgaggcgggctatgcctactctgttgccgatctcgtggcgcgccgggcgctgcaggcgcgcgaggcgggcgtcgatgggctggttctctcggcggcggaagcagccgcgatcaggtcccagcttggttctgatctgatcctggtgacgcccggcatccggccgcgcggcacctccgccaaggatcaaaagcgtgtggcgacaccctcactcgccattgccgctggcgctgatcatctcgtcgtcggacggccgattacggtggctcccgatccaaaaggcgccgctgatcagatcgtcgcggaaatcgaggcgacgcttgcatccatggctcccccgccggataagccatga

SEQ ID NO: 156053 - protein, 251 aa, Beijerinckia indica subsp. indica ATCC 9039
MNAPSSSPDKPLDPRDRLIVALDVTDPAAARTLVNRLGDSVSFYKIGMELAYGGGLPFASELLKEGKKVFLDLKLHDIATTVSNAVAQVARLGVHFLTVHAYPQTLDAARRGAVGSPLKILGVSVLTSYDDADLAEAGYAYSVADLVARRALQAREAGVDGLVLSAAEAAAIRSQLGSDLILVTPGIRPRGTSAKDQKRVATPSLAIAAGADHLVVGRPITVAPDPKGAADQIVAEIEATLASMAPPPDKP

SEQ ID NO: 156054 - DNA, 699 bp, Acinetobacter baumannii ACICU
  CDS (1)..(699): transl_table=11
atggaagaaagtctcttgagtatcattgttgcgttggacgctaaaagccaatatgacgctttaaaaattgttgaacaacttgatcctactttatgtcgcgtaaaagtaggtaaagagctttttactcatgaaggcccatctgttgtaaaaaaacttcaagaagaaaatttcgaagttttcctagatttaaaattccatgatattccaaatacgacggctcaagctgtatgtgctgccgcagacttaggtgtatggatggttaacgtacatgcatcaggtggccgtaaaatgatggaaacctgtgtggagcgtttaaaagcaggtaattatcaaacacaattaattgcggtaacagttttaacttctatggggcgtgaagatttaaaagatatcgggttagatattgaacctgtagaacaagttaaaagattggcgaaacttactaaagaaagtggtttagatggtgtagtttgttctgctcaagaagctaaaattcttcgtgagttaatcggacaagatttctctttagttactccgggaatacgtcctgagggtagtaatgcagatgaccaaaaacgtattgtaactccgaaacaggcaatgcttgatgggtctacacatttagttattggtcgtccgattactaaagcagaaaatccaactgaaatgttgaaatcgattcttgcttcaattgcttaa

SEQ ID NO: 156055 - protein, 232 aa, Acinetobacter baumannii ACICU
MEESLLSIIVALDAKSQYDALKIVEQLDPTLCRVKVGKELFTHEGPSVVKKLQEENFEVFLDLKFHDIPNTTAQAVCAAADLGVWMVNVHASGGRKMMETCVERLKAGNYQTQLIAVTVLTSMGREDLKDIGLDIEPVEQVKRLAKLTKESGLDGVVCSAQEAKILRELIGQDFSLVTPGIRPEGSNADDQKRIVTPKQAMLDGSTHLVIGRPITKAENPTEMLKSILASIA

SEQ ID NO: 156056 - DNA, 705 bp, Elusimicrobium minutum Pei191
  CDS (1)..(705): transl_table=11
atgaaaccttatgaaaaaataattgtagcgcttgacgttgatacagaaaaaaaagctttagctttagtaaaaaaattaaaaaataaagcgggcgtgtttaaaataggcaaagaactttttacctcagcggggccgggtattgttaaaaaagtacaaaaacttggcggcaaagtatttttggaccttaagtttcatgatattcccaacaccgtttataaagccgtggcttcagcctcaaaattaggcgtgtatatgatgacaattcacacaagcggcggaagtgaaatgatgaaagccgctgtaaaggcggcggaagaaaattccacaaaaaacaaacgccctattatcttaggcgttacgattttaaccagtcttgacgataatgcccttgacgaaataggatacaaacaaggggccgaaaaaatggttttacaccttgctaaaatggcaaaaaaagcgggagtaacgggcatagtatcttcgccaaaagaacttaaaaaattaagaaaggccttaggccccggcatggttttggtaaccccgggcataaggcccgtttggagcgccgcgggcgaccaaaaacgcattaccactccagccgacgcggttaaaaacggcgccagctttatggtaataggccgccccataacaggcgctaaggacccggccaaagccgcccaaatgatttccgacgaaattaaatag

SEQ ID NO: 156057 - protein, 234 aa, Elusimicrobium minutum Pei191
MKPYEKIIVALDVDTEKKALALVKKLKNKAGVFKIGKELFTSAGPGIVKKVQKLGGKVFLDLKFHDIPNTVYKAVASASKLGVYMMTIHTSGGSEMMKAAVKAAEENSTKNKRPIILGVTILTSLDDNALDEIGYKQGAEKMVLHLAKMAKKAGVTGIVSSPKELKKLRKALGPGMVLVTPGIRPVWSAAGDQKRITTPADAVKNGASFMVIGRPITGAKDPAKAAQMISDEIK

SEQ ID NO: 156058 - DNA, 738 bp, Shigella boydii CDC 3083-94
  CDS (1)..(738): transl_table=11
atgacgttaactgcttcatcttcttcccgcgctgttacgaattctcctgtggttgttgcccttgattatcataatcgtgatgacgcgctgtcctttgtcgacaagatcgacccacgcgattgtcgtctgaaggtcggcaaagagatgtttacattgtttgggccacagtttgtgcgcgaacttcaacagcgtggttttgatatctttcttgacctgaaattccacgatattcctaacactgcagcgcacgctgtcgctgctgcagctgacttaggcgtgtggatggtgaatgttcatgcctctggtggggcgcgtatgatgaccgcagcgcgtgaggcactggttccgtttggcaaagatgcaccgcttttgattgctgtaacagtgttgaccagcatggaagctagcgacctggccgatcttggcgtgacactgtcacctgcagattatgcagaacgtctggcggcactgacgcaaaaatgtggccttgatggtgtggtgtgttctgctcaggaagctgtgcgctttaaacaggtattcggtcaggagttcaaactggttacaccgggcattcgtccgcaggggagtgatgctggtgaccagcgccgcattatgacgccagaacaggcgttggcggctggtgttgattatatggcgattggtcgcccggtaacgcaatcggtagatccagcgcaaacactgaaagcgatcaacgcctctttacagcggagtgcatga

SEQ ID NO: 156059 - protein, 245 aa, Shigella boydii CDC 3083-94
MTLTASSSSRAVTNSPVVVALDYHNRDDALSFVDKIDPRDCRLKVGKEMFTLFGPQFVRELQQRGFDIFLDLKFHDIPNTAAHAVAAAADLGVWMVNVHASGGARMMTAAREALVPFGKDAPLLIAVTVLTSMEASDLADLGVTLSPADYAERLAALTQKCGLDGVVCSAQEAVRFKQVFGQEFKLVTPGIRPQGSDAGDQRRIMTPEQALAAGVDYMAIGRPVTQSVDPAQTLKAINASLQRSA

SEQ ID NO: 156060 - DNA, 717 bp, Erwinia tasmaniensis Et1/99
  CDS (1)..(717): transl_table=11
atgcattcacctcaggttaccgattcaccgatcgtagtcgcactggattatgccgatctcaatcgcgcattagcctttgtcgatcggatcgagcccggcagttgccgtcttaaggtcggcaaagagatgtttaccctgtttggcccgcagctggtgcgcgaccttcagcagcgcggttttgagatattcctcgacctcaagtttcacgatattcctaatacaacggcgcacgcggttgcggcagctgccgatctcggcgtgtggatggtcaacgtccatgccagcggcggggcgcgcatgatgagcgccgcacgcgatgcgctgttgccttttggcaaggatgcgccgctattgatcgccgtaacggttctgaccagtatggatgccagcgatttacaagggctcgggattgagctgacgcctgcggaacacgcggaacgcctggcacgtctgactcaagagtgtgggctgaatggtgttgtctgctcggcgcacgaagccagccgctttaagcaggtgctgggatcggacttccggctggtcactccgggtattcggccagcgggcagtgacgcaggcgatcagcggcgtatcatgacgccacggcaggcgcagcaggccggggtggattatatggtgatcggccgtcccattacccaatctgacgatccggcggcgaccctccacgccatccttgattctctacagggggcatga

SEQ ID NO: 156061 - protein, 238 aa, Erwinia tasmaniensis Et1/99
MHSPQVTDSPIVVALDYADLNRALAFVDRIEPGSCRLKVGKEMFTLFGPQLVRDLQQRGFEIFLDLKFHDIPNTTAHAVAAAADLGVWMVNVHASGGARMMSAARDALLPFGKDAPLLIAVTVLTSMDASDLQGLGIELTPAEHAERLARLTQECGLNGVVCSAHEASRFKQVLGSDFRLVTPGIRPAGSDAGDQRRIMTPRQAQQAGVDYMVIGRPITQSDDPAATLHAILDSLQGA

SEQ ID NO: 156062 - DNA, 723 bp, Cellvibrio japonicus Ueda107
  CDS (1)..(723): transl_table=11
atgggaactcctatgcaggttgctgcttcacgcattattgtggctatggattacgataaccgtcaggattgcctggcgatggcgcaacgcttatctccccgtgattgtcgccttaaagtgggcaaggagctttttactgcctgtggtccagcggttgttgagtctttaatgggccttggttttgaggtttttctggatcttaaatttcacgatatacccaatacgacagccaaggcggtcaaggctgctgctgagttgggggtctggatggtcaatgtccatgcctccggcgggcagcgaatgatgatggcagcgcgcgaaattcttgaaggctgccctggtaagcgccccttactaatcggggtaacggtactgaccagtatggaaagtaatgacttggccggggttggtatatcgcattctgtagaagagcaggtcaggctattggcagatttgaccaaagcttcaggtcttgatggaatcgtctgttctgcacgtgaggccgccttgatgcgtcaactctacggcacagaattttgcctggtgactccgggtattcgcctgcctgattccccgccggatgaccagcgtcgcaccttgacacctacagaggcattgacggcgggcagtagctatttggttattggccgccccattacccaggcaggtgatcccatggcaagctgccagtcaattttgcaatcagtcgctcatctggtgtga

SEQ ID NO: 156063 - protein, 240 aa, Cellvibrio japonicus Ueda107
MGTPMQVAASRIIVAMDYDNRQDCLAMAQRLSPRDCRLKVGKELFTACGPAVVESLMGLGFEVFLDLKFHDIPNTTAKAVKAAAELGVWMVNVHASGGQRMMMAAREILEGCPGKRPLLIGVTVLTSMESNDLAGVGISHSVEEQVRLLADLTKASGLDGIVCSAREAALMRQLYGTEFCLVTPGIRLPDSPPDDQRRTLTPTEALTAGSSYLVIGRPITQAGDPMASCQSILQSVAHLV

SEQ ID NO: 156064 - DNA, 738 bp, Salmonella enterica subsp. enterica serovar Newport str. SL254
  CDS (1)..(738): transl_table=11
atgacgtttactgcttcatcttcttcctgcgctattactgaatcgcctgtcgttgtggcgttggattaccatgaacgcgataaagccctggcgtttgtcgacaaaatcgatcctcgcgattgtcgcttaaaagtgggcaaagagatgttcacgctgtttggtccacaactcgttcgggatctccagcaacgtgggtttgatgtctttcttgatctaaaatttcatgatattcccaacaccacggcccgggcagtcgccgcagcggcagacctgggcgtctggatggtaaacgttcacgcgtctggcggggcgagaatgatggccgcagcgcgcgacgcgctggcgccattcggtaaagatgcgccgttgctcattgccgtgaccgtgttgaccagtatggaaaccagcgatctacacgatctgggcgtgacgttgtcaccggcggaacatgcggagcggctggcgcgcctgacgcagcaatgcgggctggatggcgtggtctgttccgctcaggaagctgtcagatttaaacaggtctttggcgctgcatttaagctggtgacgccgggcattcggcccgcaggcagcgaggcaggcgaccagcgacgcattatgacgcccgaacaggcattatccgccggcgtcgactatatggtgattggccgcccggttacgcaatcggtagatccggcgcaaacgctgaaggatattaacgcgtcactgaaacgggaggcataa

SEQ ID NO: 156065 - protein, 245 aa, Salmonella enterica subsp. enterica serovar Newport str. SL254
MTFTASSSSCAITESPVVVALDYHERDKALAFVDKIDPRDCRLKVGKEMFTLFGPQLVRDLQQRGFDVFLDLKFHDIPNTTARAVAAAADLGVWMVNVHASGGARMMAAARDALAPFGKDAPLLIAVTVLTSMETSDLHDLGVTLSPAEHAERLARLTQQCGLDGVVCSAQEAVRFKQVFGAAFKLVTPGIRPAGSEAGDQRRIMTPEQALSAGVDYMVIGRPVTQSVDPAQTLKDINASLKREA

SEQ ID NO: 156066 - DNA, 798 bp, Salmonella enterica subsp. enterica serovar Heidelberg str. SL476
  CDS (1)..(798): transl_table=11
atgcacgccgtttatccaatttgcgccacttccggtgcccatcatcaagaaggtctggtcatgacgtttactgcttcatcttcttcctgcgctattactgaatcgcctgtcgttgtggcgttggattaccatgaacgcgataaagccctggcgtttgtcgacaaaatcgatcctcgcgattgtcgcttaaaagtgggcaaagagatgttcacgctgtttggtccacaactcgttcgggatctccagcaacgtgggtttgatgtctttcttgatctaaaatttcatgatattcccaacaccacggcccgggcagtcgccgcagcggcagacctgggcgtctggatggtaaacgttcacgcgtctggtggggcgagaatgatggccgcagcgcgcgacgcgctggcgccattcggtaaagatgcgccgttgctcattgccgtgaccgtgttgaccagtatggaaaccagcgatctacacgatctgggcgtgacgttgtcaccggcggaacatgcggagcggctggcgcgcctgacgcagcaatgcgggctggatggcgtggtctgttccgctcaggaagcggtcagatttaaacaggtctttggcgctgcatttaagctggtgacgccgggcattcggcccgcaggcagcgaggcaggcgaccagcgacgcattatgacgcccgaacaggcattatccgctggcgtcgactatatggtgattggccgcccggttacgcaatcggtagatccggcgcaaacgctgaaggatattaacgcgtcactgaaacgggaggcataa

SEQ ID NO: 156067 - protein, 265 aa, Salmonella enterica subsp. enterica serovar Heidelberg str. SL476
MHAVYPICATSGAHHQEGLVMTFTASSSSCAITESPVVVALDYHERDKALAFVDKIDPRDCRLKVGKEMFTLFGPQLVRDLQQRGFDVFLDLKFHDIPNTTARAVAAAADLGVWMVNVHASGGARMMAAARDALAPFGKDAPLLIAVTVLTSMETSDLHDLGVTLSPAEHAERLARLTQQCGLDGVVCSAQEAVRFKQVFGAAFKLVTPGIRPAGSEAGDQRRIMTPEQALSAGVDYMVIGRPVTQSVDPAQTLKDINASLKREA

SEQ ID NO: 156068 - DNA, 702 bp, Vibrio sp. Ex25
  CDS (1)..(702): transl_table=11
atgatcgaccaaaaagttattgtcgcactggattatgataaccaagcagacgcacttgcgtttgtagatagaattgatcctgcgtcatgtcgcctaaaagttggcaaggaaatgtttacgctatttggtcctgatttcgtacgtgaactccacaaacgtggtttctcagtcttcttggatttgaaatttcacgatattccaaatacgtgttctaaggcggtccgcgcagccgcggaattaggggtttggatggttaatgtgcatgcgagcggtggtgagcgcatgatgacggcatcacgtgaaattcttgagccatacggtaaagatcgcccacttctgattggagtaacggtactaaccagtatggaacaaagtgatttagcgggtattggtttgaacattgcgcctcaggatcaagttattcgtctggcgacattgaccaaaaacgctggtttagatggtgtcgtatgttcagctcaagagtcttcattgcttaagagcgaacttggtcaagactttaagttagttacaccaggaatccgacctgctggctctgagcaaggtgaccagcgccgtatcatgacaccagtagaggctattcagtcaggctctgactatcttgttattgggcgtccaattactcaagctgtggatcctgctgcagtgttgaaatcgatcaatgatagcttgtctagtatgtaa

SEQ ID NO: 156069 - protein, 233 aa, Vibrio sp. Ex25
MIDQKVIVALDYDNQADALAFVDRIDPASCRLKVGKEMFTLFGPDFVRELHKRGFSVFLDLKFHDIPNTCSKAVRAAAELGVWMVNVHASGGERMMTASREILEPYGKDRPLLIGVTVLTSMEQSDLAGIGLNIAPQDQVIRLATLTKNAGLDGVVCSAQESSLLKSELGQDFKLVTPGIRPAGSEQGDQRRIMTPVEAIQSGSDYLVIGRPITQAVDPAAVLKSINDSLSSM

SEQ ID NO: 156070 - DNA, 798 bp, Salmonella enterica
  subsp. enterica serovar Schwarzengrund str. CVM19633
  CDS (1)..(798): transl_table=11
atgcacgccgtttatccaatttgcgccacttccggtgcccatcatcaagaaggtctggtcatgacgtttactgcttcatcttcttcctgcgctattactgaatcgcctgtcgttgtggcgttggattaccatgaacgcgataaagccctggcgtttgtcgataaaatcgatcctcgcgattgtcgcttaaaagtgggcaaagagatgttcacgttatttggcccacagctcgtccgggatctccagcaacgtgggtttgatgtctttcttgatctaaaatttcatgatattcccaacaccacggcccgggcagtcgccgcagcggcagacctgggcgtctggatggtaaacgttcacgcgtctggcggggcgagaatgatggccgcagcgcgcgacgcgctggcgccattcggtaaagatgcgccgttgctcattgccgtgaccgtgttgaccagtatggaaaccagcgatctgcgcgatctgggcgtgatgttgtcaccggcggaacatgcggagcggctggcgcgcctgacgcagcaatgcgggctggatggcgtggtctgttccgctcaggaagcggtcagatttaaacaggtctttggcgctgcatttaagctggtgacgccgggcattcggcccgcaggcagcgaggcaggcgatcagcgacgcattatgacgcccgaacaggcattatccgccggcgtcgactatatggtgattggccgcccggttacgcaatcggtagatccggcgcaaacgctgaaggatattaacgcgtcactgaaacgggaggcataa

SEQ ID NO: 156071 - protein, 265 aa, Salmonella enterica
  subsp. enterica serovar Schwarzengrund str. CVM19633
MHAVYPICATSGAHHQEGLVMTFTASSSSCAITESPVVVALDYHERDKALAFVDKIDPRDCRLKVGKEMFTLFGPQLVRDLQQRGFDVFLDLKFHDIPNTTARAVAAAADLGVWMVNVHASGGARMMAAARDALAPFGKDAPLLIAVTVLTSMETSDLRDLGVMLSPAEHAERLARLTQQCGLDGVVCSAQEAVRFKQVFGAAFKLVTPGIRPAGSEAGDQRRIMTPEQALSAGVDYMVIGRPVTQSVDPAQTLKDINASLKREA

SEQ ID NO: 156072 - DNA, 699 bp, Alteromonas macleodii 'Deep ecotype'
  CDS (1)..(699): transl_table=11
atgcatgacccacgcgttattgttgctttagactatgacaataaagacactgcattagcgtttgtagataaattagacccaagcttatgcaagctaaaagtgggcaaagagatgttcacgttgtttggcccagaattcgtaaaagcgcttattgcaaaaggctttgatgtatttctggaccttaaatttcacgatatacctaatactgtggcaaaagcgtgtaaagccgctgcggaacttggtgtgtggatggtaaacgtacatgcttctggcggtctacctatgatgcaagcggcgaaagaagccattgcaacaagcagtaatcctcaaactaagcttattgcggttaccgtacttaccagcatggataatgcgcaattggcggatgtggtaagcggcgtaacaccagaacaacaagtactgcgcttggcggcactgacagaaaaagcagggctagacggcattgtttgttcagcgcaagaagccagcgcgttgcgtgaaaaacatagcgacgactttctattagttacgccaggtattcgccctgtaggcgctgacgctggcgaccaaaaacgtgttatgacacctcctgatgcaatgaaagcgggcgtgagctatttggtaatggggcggcccatcacgaaagcagaagaccccattgcggttttaaaagcggtgaacgcctcgcttaatggctga

SEQ ID NO: 156073 - protein, 232 aa, Alteromonas macleodii 'Deep ecotype'
MHDPRVIVALDYDNKDTALAFVDKLDPSLCKLKVGKEMFTLFGPEFVKALIAKGFDVFLDLKFHDIPNTVAKACKAAAELGVWMVNVHASGGLPMMQAAKEAIATSSNPQTKLIAVTVLTSMDNAQLADVVSGVTPEQQVLRLAALTEKAGLDGIVCSAQEASALREKHSDDFLLVTPGIRPVGADAGDQKRVMTPPDAMKAGVSYLVMGRPITKAEDPIAVLKAVNASLNG

SEQ ID NO: 156074 - DNA, 747 bp, Proteus mirabilis HI4320
  CDS (1)..(747): transl_table=11
atgtcatttgattgtgataaaaaatcgcccagctctacctgcgcgcccgttattgtggcactagactatgaagaccaaaaaagtgcactcgattttgcacaacttatcgacccttcatcttgtcgccttaaaattggtaaagagatgtttactcgctttggaccgcaatttgtaacgcaattgcaacagcaagggtttgatattttcttagatttaaaatttcatgatatacccaatacggtggcgagagcagttgccgcggctgccgatttaggggtatggatggtaaatgtgcatgcgagtggtggtagtcgtatgatgcgtgcggcaaaggagagcttaagatcatttggcaaagaggcaccgctattaaccgctgtcactgtgttgaccagtatggatcaatccgatctcactgaattgggcattaacctaactccagcagaacaagccgaacgcttagcattactggctaaagcctgtggtcttgatggtgtggtatgttcggcccatgaagccactcgttttaaacaagtgtgtggtgatgactttttattggtcactcccggaattcgacccgcggggagcgaagtgggtgatcagcgtcgagttatgacgccagagcaagcgatagtggctggggtggattatatggtgatcggcagacctattacacgcagtgaaaatccactggaaactttacagcaaattaatcgttctatacaaggtgttgtgcaacatggataa

SEQ ID NO: 156075 - protein, 248 aa, Proteus mirabilis HI4320
MSFDCDKKSPSSTCAPVIVALDYEDQKSALDFAQLIDPSSCRLKIGKEMFTRFGPQFVTQLQQQGFDIFLDLKFHDIPNTVARAVAAAADLGVWMVNVHASGGSRMMRAAKESLRSFGKEAPLLTAVTVLTSMDQSDLTELGINLTPAEQAERLALLAKACGLDGVVCSAHEATRFKQVCGDDFLLVTPGIRPAGSEVGDQRRVMTPEQAIVAGVDYMVIGRPITRSENPLETLQQINRSIQGVVQHG

SEQ ID NO: 156076 - DNA, 693 bp, Mannheimia haemolytica PHL213
  CDS (1)..(693): transl_table=11
atgaacaataaagtaattgttgcgttagactatgaaactgaacgtgaagcattagaatttgtggatttggtcgatccgtcgctttgtcgtttaaaagtaggcaaagaaatgtttacaaccttaggcacaaattttgtcaaacaattacacgaacgtaaatttgatgtattccttgatttaaaatatcatgatattccaaatacggttgctcgagcagtacgttctgctgctgatcttggtgtgtggatggttgacttgcatgcttctggtggtttagccatgatggaagaggcaaagaaaattttggagccttatggcaaagaggcaccattattaattgcagtgacggttctaaccagtatggaagatttggatttgcttcaaataggtattaatgcttcgccgatggaacaagttattcgtttagcacatttagcacaacgggctggtttagatggcgtggtatgttctccacaagaagttgaggtattacgtacccattgtggtcaagattttaaattagtgaccccaggaatccggccaaaaggaacagattttggggatcaacgccgagtgatgacacccaaacaagcagtagaaacaggctcagattttttggttattggtcgtcctattacccaagctcaagatccgcttgcggtattaaaatctattaaccaatctatcagttaa

SEQ ID NO: 156077 - protein, 230 aa, Mannheimia haemolytica PHL213
MNNKVIVALDYETEREALEFVDLVDPSLCRLKVGKEMFTTLGTNFVKQLHERKFDVFLDLKYHDIPNTVARAVRSAADLGVWMVDLHASGGLAMMEEAKKILEPYGKEAPLLIAVTVLTSMEDLDLLQIGINASPMEQVIRLAHLAQRAGLDGVVCSPQEVEVLRTHCGQDFKLVTPGIRPKGTDFGDQRRVMTPKQAVETGSDFLVIGRPITQAQDPLAVLKSINQSIS

SEQ ID NO: 156078 - DNA, 699 bp, Vibrio cholerae AM-19226
  CDS (1)..(699): transl_table=11
atgaacgacccaaaagtgattgttgcactggactatgacaatctggcggatgcgctcgcgtttgcggacaaaattgacccaagcacatgtcgactcaaagtgggtaaagagatgtttactctatttggtcctgattttgtccgtgagctgcataaacgaggtttttctgtgtttctggatctgaaatttcacgatattccgaatacctgttcaaaagcggtgaaagctgccgctgagcttggggtttggatggtgaatgtgcatgcgagtggtggcgagcgaatgatggcagcatcgcgtgagattctggagccgtatggtaaagatcgcccactgctgattggtgtcactgtattgaccagtatggaatctgccgatttacaaggtattggcatcttgagtgcgccacaagatcatgtgctgcgattagcaacgctcaccaaaaatgctggtcttgatggtgtggtatgctctgcacaagaggcatcactattgaagcaacatttagggcgtgaattcaaattggtgacgccaggaattcgtccagcgggttcagagcaaggcgatcaacgccgtattatgactccagcccaagccattgcctctggttcagattatctcgtgatcggtcgccctatcactcaagccgcacatcctgaagtggttctggaagagatcaaccaaacattatctaagtga

SEQ ID NO: 156079 - protein, 232 aa, Vibrio cholerae AM-19226
MNDPKVIVALDYDNLADALAFADKIDPSTCRLKVGKEMFTLFGPDFVRELHKRGFSVFLDLKFHDIPNTCSKAVKAAAELGVWMVNVHASGGERMMAASREILEPYGKDRPLLIGVTVLTSMESADLQGIGILSAPQDHVLRLATLTKNAGLDGVVCSAQEASLLKQHLGREFKLVTPGIRPAGSEQGDQRRIMTPAQAIASGSDYLVIGRPITQAAHPEVVLEEINQTLSK

SEQ ID NO: 156080 - DNA, 708 bp, Oligotropha carboxidovorans OM5
  CDS (1)..(708): transl_table=11
atgacgcagaccccgaccaatccgcgcgagcggctcatcgtggcgcttgacgtgccggacgttgcgcaggcctcaaaacttgtcgccacgctcgacgacagcgttctcttctacaagatcggttatcagctcgcttacgccggcgggctttcgatggcgcaggatctgatcggtgccggcaagaaggtgttcatcgacctcaagctgcacgacatcggcaacaccgtcgcgagcggcgtggccagcattgcaaagctcggcgccaccttccttaccgtgcatgcctatccgcagacgatgaaagcggcggtggaagcgagccgcggcacgggcctgaaaattctcgcggtcacggtgctgacctcctacgacgaggccgatctcaaggaagcgggctacagcctcggcgtcgccgatctcgttgcgcagcgcgcgcggcaggcacaggcgatcggcattgacggtctcgtttgctcggccgaggaggcggcgaatctgcgcgcgattgtcggcgagggcctctcgctggtaacgcccggcattcgccccgcaggcagcgccgttggcgaccagaagcgggtgatgacgcccgcgcgtgccatcgccgcgggcgccgattatctcgtggtcgggcggccgatcgttgccgctacggatccgaagtcggcggccaacgcgatcgtcgcggaaattgcggtggctcactga

SEQ ID NO: 156081 - protein, 235 aa, Oligotropha carboxidovorans OM5
MTQTPTNPRERLIVALDVPDVAQASKLVATLDDSVLFYKIGYQLAYAGGLSMAQDLIGAGKKVFIDLKLHDIGNTVASGVASIAKLGATFLTVHAYPQTMKAAVEASRGTGLKILAVTVLTSYDEADLKEAGYSLGVADLVAQRARQAQAIGIDGLVCSAEEAANLRAIVGEGLSLVTPGIRPAGSAVGDQKRVMTPARAIAAGADYLVVGRPIVAATDPKSAANAIVAEIAVAH

SEQ ID NO: 156082 - DNA, 798 bp, Salmonella enterica
  subsp. enterica serovar Dublin str. CT_02021853
  CDS (1)..(798): transl_table=11
atgcacgccgtttatccaatttgcgccacttccggtgcccatcatcaagaaggtctggtcatgacgtttactgcttcatcttcttcctgcgctattactgaatcgcctgtcgttgtggcgttggattaccatgaacgcgataaagccctggcgtttgtcgacaaaatcgatcctcgcgattgtcgcttaaaagtgggcaaagagatgttcacgctgtttggtccacaactcgttcgggatctccagcaacgtgggtttgatgtctttcttgatctaaaatttcatgatattcccaacaccacggcccgggcagtcgccgcagcggcagacctgggcgtctggatggtaaacgttcacgcgtctggtggggcgagaatgatggccgcagcgcgcgacgcgctggcgccattcggtaaagatgcgccgttgctcattgccgtgaccgtgttgaccagtatggaaaccagcgatctacacgatctgggcgtgacgttgtcaccggcggaacatgcggagcggctggcgcgcctgacgcagcaatgcgggctggatggcgtggtctgttccgctcaggaagctgtcagatttaaacaggcctttggcgctgcatttaagctggtgacgccgggcattcggcccgcaggcagcgaggcaggcgaccagcgacgcattatgacgcccgaacaggcattatccgctggcgtcgactatatggtgattggccgcccggttacgcaatcggtagatccggcgcaaacgctgaaggatattaacgcgtcactgaaacgggaggcataa

SEQ ID NO: 156083 - protein, 265 aa, Salmonella enterica
  subsp. enterica serovar Dublin str. CT_02021853
MHAVYPICATSGAHHQEGLVMTFTASSSSCAITESPVVVALDYHERDKALAFVDKIDPRDCRLKVGKEMFTLFGPQLVRDLQQRGFDVFLDLKFHDIPNTTARAVAAAADLGVWMVNVHASGGARMMAAARDALAPFGKDAPLLIAVTVLTSMETSDLHDLGVTLSPAEHAERLARLTQQCGLDGVVCSAQEAVRFKQAFGAAFKLVTPGIRPAGSEAGDQRRIMTPEQALSAGVDYMVIGRPVTQSVDPAQTLKDINASLKREA

SEQ ID NO: 156084 - DNA, 798 bp, Salmonella enterica subsp. enterica serovar Gallinarum str. 287/91; identical to SEQ ID NO: 156082
  CDS (61)..(798): transl_table=11

SEQ ID NO: 156085 - protein, 245 aa, Salmonella enterica subsp. enterica serovar Gallinarum str. 287/91
MTFTASSSSCAITESPVVVALDYHERDKALAFVDKIDPRDCRLKVGKEMFTLFGPQLVRDLQQRGFDVFLDLKFHDIPNTTARAVAAAADLGVWMVNVHASGGARMMAAARDALAPFGKDAPLLIAVTVLTSMETSDLHDLGVTLSPAEHAERLARLTQQCGLDGVVCSAQEAVRFKQAFGAAFKLVTPGIRPAGSEAGDQRRIMTPEQALSAGVDYMVIGRPVTQSVDPAQTLKDINASLKREA

SEQ ID NO: 156086 - DNA, 738 bp, Klebsiella pneumoniae 342
  CDS (1)..(738): transl_table=11
atgacgtctacagctatcacatcttcccgcgctgtcacatcctctcccgttgtggttgcgctcgactatgataatcgcgataaagcgctggcatttgtcgaccgcatcgacccgcgagactgccgcctgaaggtgggcaaagagatgttcaccctgttgggcccgcagtttgttcgcgatctgcaccagcgcgggttcgaggtgttccttgaccttaagtttcacgatatccccaataccacggcccgcgcggtggcggcggcggccgaactcggcgtatggatggtgaatgtccatgcctccggcggcgcgcggatgatgaccgccgcgcgtgaagcgctgctgccgtttggtaaagaggctccgctgctgatcgccgtcaccgtactcaccagcatggaggccagcgacctgcaggatctgggcattaccttatccccggctgattacgcggcgaagctggcagcgctgacccaacgctgtggtcttgacggggtcgtgtgctcagctcaggaggcggtgcgcttcaaacaggagatggggcaggcgtttaagctggtgaccccggggatccgtccgcaggggagcgaggccggggatcagcggcggattatgactcccgagcaggcccaggcggcgggggtggattatatggttattggtcgcccggtcactcagtcggccgatcctgccgcaacgctgcgggcgatcaacgtctcgttgtcaaaggaggcataa

SEQ ID NO: 156087 - protein, 245 aa, Klebsiella pneumoniae 342
MTSTAITSSRAVTSSPVVVALDYDNRDKALAFVDRIDPRDCRLKVGKEMFTLLGPQFVRDLHQRGFEVFLDLKFHDIPNTTARAVAAAAELGVWMVNVHASGGARMMTAAREALLPFGKEAPLLIAVTVLTSMEASDLQDLGITLSPADYAAKLAALTQRCGLDGVVCSAQEAVRFKQEMGQAFKLVTPGIRPQGSEAGDQRRIMTPEQAQAAGVDYMVIGRPVTQSADPAATLRAINVSLSKEA

SEQ ID NO: 156088 - DNA, 699 bp, Thermodesulfovibrio yellowstonii DSM 11347
  CDS (1)..(699): transl_table=11
atgaccttagacagggtaataattgctcttgattttccaagtaaaaaagaggctctgaaaattgttgatgagcttgatgaactgataagtttttacaaagtagggcttgagctttttctcaacgaaggtaaagagattttaaaaactctaaaaaaaagagagaaaaaaatcttccttgatcttaaatttcacgatattccgaacactgttcagagagctgtcaagacaagtttaaactatggcgtggatatgctgactttacatacaacaggtggctttgagatgatgaaaagggcaagggagactgtagaggaagcaaaaattagagagaatgtttctttaaagcttttaggagtaactgtgcttacaagtcttgatagtaaaagtcttgaagaaatttatggattaacctttgatatcccatctcttgtaaaaaaacttgcaatgcttgctaaaaagacaggagttgatggagttgtagcctctgcccatgagatatctacaattaaagaacactgtggcagggattttacagtagtaactccaggaattaggctgggaaaactgtctcatgacgatcagaaaagaacagtgactccgcaagaggctttcctcagaggtgcggactatatagtaattggaagagcagtcatatcttctcaaaatcccagagaagttctcttaaacctgttcagatga

SEQ ID NO: 156089 - protein, 232 aa, Thermodesulfovibrio yellowstonii DSM 11347
MTLDRVIIALDFPSKKEALKIVDELDELISFYKVGLELFLNEGKEILKTLKKREKKIFLDLKFHDIPNTVQRAVKTSLNYGVDMLTLHTTGGFEMMKRARETVEEAKIRENVSLKLLGVTVLTSLDSKSLEEIYGLTFDIPSLVKKLAMLAKKTGVDGVVASAHEISTIKEHCGRDFTVVTPGIRLGKLSHDDQKRTVTPQEAFLRGADYIVIGRAVISSQNPREVLLNLFR

SEQ ID NO: 156090 - DNA, 705 bp, Aliivibrio salmonicida LFI1238
  CDS (1)..(705): transl_table=11
atgaaagaccaaaaggtaattgtggcattggattatgaccgtcaagctgacgcattggcgttcgtggataaaattgatcctagctcgtgccgattaaaagtgggtaaagagatgtttactctttttggccctgagtttgtaaaagaacttcataagcgtggtttttctgtttttctagatttaaaatttcatgatattcctaatacgtgttcaaaagcagttcgtgcagctgctgaaatgggggtttggatggtaaatgttcatgcgagtggtggtgagcggatgatgacagcttcgcgtgagattttagaaccgtatggcaaagatcgcccattattaattggtgtgactgttttaacgagcatggaacagcaagatttagcgggtattggtttagatatcgcaccacaagagcaagttaaacgtcttgctgcattaacaaaaaacagtggtttggacggagtagtttgctcagctcaagaagcatcaatgctaaaagctgacctaggtaaatactttaagttagtaacacctggtatccgtcctgtgggttcagacgttggtgatcaaaaacgtatcatgactccagttgatgcgattatttcaggatctgattacttggtaattgggcgcccaattactcaagctgaaaacccatcacaagtattaaatgacattaatttgtcgttggctcccgtcttataa

SEQ ID NO: 156091 - protein, 234 aa, Aliivibrio salmonicida LFI1238
MKDQKVIVALDYDRQADALAFVDKIDPSSCRLKVGKEMFTLFGPEFVKELHKRGFSVFLDLKFHDIPNTCSKAVRAAAEMGVWMVNVHASGGERMMTASREILEPYGKDRPLLIGVTVLTSMEQQDLAGIGLDIAPQEQVKRLAALTKNSGLDGVVCSAQEASMLKADLGKYFKLVTPGIRPVGSDVGDQKRIMTPVDAIISGSDYLVIGRPITQAENPSQVLNDINLSLAPVL

SEQ ID NO: 156092 - DNA, 759 bp, Anoxybacillus flavithermus WK1
  CDS (1)..(759): transl_table=11
ttggctttgaccatatttccgaatgtacgggaaggagctggaacaatggacaaaccgtttattgtggcgcttgattttgcatcaaaggaagaagtgcggtcgtttttgcagttattttctgacacatcgctctttttaaaagtcggcatggagctatattttcaagaaggtccagcgatcatcgacgaattaaagcagcgcggacatgatatttttttagatttaaagcttcatgatattccgcatacagtaaaacgagcaatgaaaggattggcgaaattaggcgttgatttagtgaacgttcatgcatcaggaggaagcgcgatgatgcgcgcagcgatcgaaggattagaagaaggaacaccgcacgggatgaaccgtccccgttgcattgcggtaacgcagctgacaagtacaagtgaacaaatgcttcgtgatgagctttgcatggagcgaacgatggaagaaatcgtgcttcattatgcggagcttgccaaaacaagcggacttgatggtgtcgtctgctcggcgaaagaagtaccgctcattcgcgaacgatgcggggaacagtttttgacagttactcctgggattcgctttgcgaacgatgacaaaaacgaccaagttcgcgtcgtgacaccgtatgaagccaaacagcttggaacaaattatatcgtcatcggacgaagcattacaaaagcacatgatccatatgcagcatatgagcggttaaaacgagagtgggatggtggacaataa

SEQ ID NO: 156093 - protein, 252 aa, Anoxybacillus flavithermus WK1
MALTIFPNVREGAGTMDKPFIVALDFASKEEVRSFLQLFSDTSLFLKVGMELYFQEGPAIIDELKQRGHDIFLDLKLHDIPHTVKRAMKGLAKLGVDLVNVHASGGSAMMRAAIEGLEEGTPHGMNRPRCIAVTQLTSTSEQMLRDELCMERTMEEIVLHYAELAKTSGLDGVVCSAKEVPLIRERCGEQFLTVTPGIRFANDDKNDQVRVVTPYEAKQLGTNYIVIGRSITKAHDPYAAYERLKREWDGGQ

SEQ ID NO: 156094 - DNA, 738 bp, Escherichia fergusonii ATCC 35469
  CDS (1)..(738): transl_table=11
atgacgtctacagcttcatcttcttctcgtattgtcactgattcccccattgttgttgctcttgattatcataatcgcgagaacgcactggcatttgtcgacaaaattgatccgcgcgactgtcgtctgaaagtgggtaaagagatgtttaccctcttcgggccacagttcgtgcgtgaattacagcaacgtggtttcgacatctttctcgatttgaaatttcatgatatcccaaatactgctgcacatgcggtagctgctgctgcagacctgggggtatggatggtgaacgttcatgcatcgggtggggcgcgcatgatgaccgcagcccgcgaagcgttactcccgtttggtaaagacgcaccgcttttgattgccgtgactgtcctgaccagtatggaagccagtgatttagcagatcttggcgtgacagtgtcacctgcacaatatgcggaacgtctggctgggttaacccaaaaatgtggtctcgatggcgtagtttgttcagctcaggaggcagtgcgttttaaacaggcattcggtgaggattttaaacttgttacgccgggaattcgtccacaaggtagtgctgctggagatcagcgccgtattatgacgccagaacaggcactggcagcaggcgtagattatatggttattggacgcccggtaacgcaatctgaagatcctgcccagacactgaaaaccatcaatgcatctttaaaaggacatggatga

SEQ ID NO: 156095 - protein, 245 aa, Escherichia fergusonii ATCC 35469
MTSTASSSSRIVTDSPIVVALDYHNRENALAFVDKIDPRDCRLKVGKEMFTLFGPQFVRELQQRGFDIFLDLKFHDIPNTAAHAVAAAADLGVWMVNVHASGGARMMTAAREALLPFGKDAPLLIAVTVLTSMEASDLADLGVTVSPAQYAERLAGLTQKCGLDGVVCSAQEAVRFKQAFGEDFKLVTPGIRPQGSAAGDQRRIMTPEQALAAGVDYMVIGRPVTQSEDPAQTLKTINASLKGHG

SEQ ID NO: 156096 - DNA, 738 bp, Escherichia coli ED1a
  CDS (1)..(738): transl_table=11
atgacgttaactgcttcatcttcttcccgcgctgttacgaattctcctgtagttgttgcccttgattatcataatcgcgatgccgcgatggcctttgtcgacaagatcgacccacgcgattgtcgtctgaaggtcggcaaagagatgtttacattgtttgggccacagtttgtgagcgaacttcaacagcgtggttttgatatctttcttgacctgaaattccacgatattcccaacactgcagcgcacgctgtcgctgctgcggctgacttaggcgtgtggatggtgaatgttcatgcctccggtggggcgcgtatgatggccgcagcgcgtgaggcactggttccgtttggcaaagatgcaccgcttttgattgctgtgacagtgttgaccagcatggaagccagcgacctggccgatcttggcgtgacactgtcacctgcagattatgcagaacgtctggcggcactgacgcaaaaatgtggccttgatggtgtggtgtgttctgctcaggaagctgtgcgctttaaacaggtattcggtcaggagttcaaactggttacgccgggcattcgtccgcaggggagtgatgctggtgaccagcgccgcattatgacgccagaacaggcgttgtcggctggtgttgattatatggtgattggtcgcccggtaacgcaatcggtagatccagcgcagacgctgaaagcgatcaacgcctctttacagcggagtgcatga

SEQ ID NO: 156097 - protein, 245 aa, Escherichia coli ED1a
MTLTASSSSRAVTNSPVVVALDYHNRDAAMAFVDKIDPRDCRLKVGKEMFTLFGPQFVSELQQRGFDIFLDLKFHDIPNTAAHAVAAAADLGVWMVNVHASGGARMMAAAREALVPFGKDAPLLIAVTVLTSMEASDLADLGVTLSPADYAERLAALTQKCGLDGVVCSAQEAVRFKQVFGQEFKLVTPGIRPQGSDAGDQRRIMTPEQALSAGVDYMVIGRPVTQSVDPAQTLKAINASLQRSA

SEQ ID NO: 156098 - DNA, 696 bp, Vibrio splendidus LGP32
  CDS (1)..(696): transl_table=11
atgaacgaccaaaaaatcattgtagcattggattatgataaccaagcggatgcgttagcctttgtcgatcgtattgaccctgcatcttgccgcctaaaagttggcaaagagatgtttactctgtttggccctgaatttgttcgtgaattacataaacgtggtttctctgtgtttttggaccttaagttccacgatatcccgaacacatgttcaaaagcggtacgtgctgccgctgagatgggcgtgtggatggtgaacgtacacgcgagcggtggcgagcgtatgatgacggcttctcgtgaaattttggaaccatatggtaaagatcgtccattgttaatcggtgtgacggtactaaccagtatggagcaatctgacttagcgggtatcggtctggatctagagccacagcaacaagtgatgcgcttagcgtctttgactaaaaactcaggcctagacggtgttgtatgttctgcacaagaggcttctttacttaaaggagcacttggtcaagagttcaagctagttactccaggtattcgtcctgtaggggctgatgttggtgaccagaagcgtatcatgacgccttctaaggcgattgaatcaggttcagattaccttgttattggccgtcccatcactcaagctatagaccctgcggcggtacttgcagagatcaacggtacgctagcttaa

SEQ ID NO: 156099 - protein, 231 aa, Vibrio splendidus LGP32
MNDQKIIVALDYDNQADALAFVDRIDPASCRLKVGKEMFTLFGPEFVRELHKRGFSVFLDLKFHDIPNTCSKAVRAAAEMGVWMVNVHASGGERMMTASREILEPYGKDRPLLIGVTVLTSMEQSDLAGIGLDLEPQQQVMRLASLTKNSGLDGVVCSAQEASLLKGALGQEFKLVTPGIRPVGADVGDQKRIMTPSKAIESGSDYLVIGRPITQAIDPAAVLAEINGTLA

SEQ ID NO: 156100 - DNA, 693 bp, Haemophilus parasuis SH0165
  CDS (1)..(693): transl_table=11
atggacaacaaaattatcgtcgcccttgactatgaaacagaagctgaagccctcaatttcgttgatcaagtcgatccgtccctttgtcgtttaaaagttggcaaagagatgtttaccacattgggtacacactttgtgaaacagttacaagaccgcaaatttgatgtctttttagatttaaaatatcacgatattcctaacaccgtcgcaagagcggtgcgttcggcggcagatttgggggtgtggatggtggatttacacgcctgcggcggtttacgaatgatggaaaccgcaaaacaaattttagagccttacggcaaagatgcaccattattgattggtgtgactgtgctaaccagtatggaagatttagatttattgcaaattgggattaatgcgtcaccgatggaacaagttattcgtcttgcccatttgtgccaacgtgcagggttagatggtgttgtttgctctccacaagaagttgaggtattaagaactcactgtggcaaagattttaaactcgtcacgccaggtattcgtcctgaagggagtgattttggcgatcagcgtcgtgtgatgaccccaaaacaagcgattgaaataggatcagactatttggtgatcggccgtcctattacccaagcagccgatcctcttgcagtattaaaatcaattaatcaatctatcgcttaa

SEQ ID NO: 156101 - protein, 230 aa, Haemophilus parasuis SH0165
MDNKIIVALDYETEAEALNFVDQVDPSLCRLKVGKEMFTTLGTHFVKQLQDRKFDVFLDLKYHDIPNTVARAVRSAADLGVWMVDLHACGGLRMMETAKQILEPYGKDAPLLIGVTVLTSMEDLDLLQIGINASPMEQVIRLAHLCQRAGLDGVVCSPQEVEVLRTHCGKDFKLVTPGIRPEGSDFGDQRRVMTPKQAIEIGSDYLVIGRPITQAADPLAVLKSINQSIA

SEQ ID NO: 156102 - DNA, 696 bp, Alcanivorax sp. DG881
  CDS (1)..(696): transl_table=11
atgcctatttccagccccgttattgtcgctctggactatcccgatgcagcccaggctctggccatggcaaagcaactggatccggccaaggtgcgggtaaaggtgggcaaggaaatttttacccgcagtggcccggcggtggtggaatcgctacacaagctgggctttgaggtatttctggacctgaaattccacgacatccccaataccgtggcaggcgctgtggcggccgcggcggacatgggcgtgtggatggtgaacgtgcacgccagtggtggccagcggatgatggaaggcgcggccaatgccattgccaatcgcgcccagcgtccacacctgattgccgtgactgtgttgaccagcatggatgacagcgatctgcagcaggtgggtgtggtggatgtgcccaaggtacaggtgcagcgcctggcagagctggccaaggcgtcaggcatggatggcgtggtctgttctgcccaggaagcggtaatgctgaaacaggcctgcggatcggcctttgaactggtgaccccggggattcgaccggaagggtcagacgcgggagatcagcgtcgggtgcttacaccggtacaggctcgtgatgcgggtgtggactatatggtaatcggccggcccatcacccagtccgccacacctacggatgtagtcgacgctatattacaaagtctggcctaa

SEQ ID NO: 156103 - protein, 231 aa, Alcanivorax sp. DG881
MPISSPVIVALDYPDAAQALAMAKQLDPAKVRVKVGKEIFTRSGPAVVESLHKLGFEVFLDLKFHDIPNTVAGAVAAAADMGVWMVNVHASGGQRMMEGAANAIANRAQRPHLIAVTVLTSMDDSDLQQVGVVDVPKVQVQRLAELAKASGMDGVVCSAQEAVMLKQACGSAFELVTPGIRPEGSDAGDQRRVLTPVQARDAGVDYMVIGRPITQSATPTDVVDAILQSLA

SEQ ID NO: 156104 - DNA, 741 bp, Cyanobium sp. PCC 7001
  CDS (1)..(741): transl_table=11
atgcgctcagctgcgccggtgccgggggccttggatagcgccgatcgcctcatcctggccctcgacggcatggagcccgaccgagcggggcggctggtggcggccatccccgacctgcgctgggtgaaggtgggcctggagctgttcgtcaacgcaggcccctccgtggtgctccggctgcgcgaggcgggcctgcaggtgttcctcgatctgaagttccacgacatcccggccaccatggccggggcctgccgccgggcggcagccctcggtgcccagttgatcaccgtgcatgccgcggccggcagcgaggccctggcggccgcccaggccgccgccgaccagggggctgcggaggctggactcccctgcccatgcctgctggccgtgaccgtgctcaccagctgggatccccaccgcttccaggcggaactggctgtgcaggaaccggtggagcggcatgtgccccgcctcgccgccctggcggcggaagcgggaatcggaggtgccgtctgctcaccgctggaggtggcgctcctgcgccaggcccatcccgagccgttccggctggtgaccccggggatccggccggccggcgtcgccagcggcgaccagcggcgcaccatgactcccggccaggccctggccgccggggcgagccagctggtggtgggccggccgatcacggcggcgcccgatccggcggaggccttcgcggcctgctgcgccgagctgggctga

SEQ ID NO: 156105 - protein, 246 aa, Cyanobium sp. PCC 7001
MRSAAPVPGALDSADRLILALDGMEPDRAGRLVAAIPDLRWVKVGLELFVNAGPSVVLRLREAGLQVFLDLKFHDIPATMAGACRRAAALGAQLITVHAAAGSEALAAAQAAADQGAAEAGLPCPCLLAVTVLTSWDPHRFQAELAVQEPVERHVPRLAALAAEAGIGGAVCSPLEVALLRQAHPEPFRLVTPGIRPAGVASGDQRRTMTPGQALAAGASQLVVGRPITAAPDPAEAFAACCAELG

SEQ ID NO: 156106 - DNA, 708 bp, Desulfovibrio vulgaris str. Hildenborough
  CDS (1)..(708): transl_table=11
atggccgaactcgttgtcgcactggattttcccgccgcagacgtggcggtggacatggcaggcagactccgcggcaccgcgccgtggatgaaggtaggcctcgaactcttctgcgccgcaggtcccgatgtcgtgcgtgccgtggcagacctcggcttcagggtctttctcgacctcaagttccacgacatccccaacacggtgcgcggtgcggtgcgttcggcggtgcgttccggggcggacatggtcaacatccatctcatgggcggcgaacgtatggcccgtgccgccgtggaaggtctgcacgagggtgcccagacgacgggttccgtaccgttgctcttcggggtgaccgtgctcaccagcaccgcacagggtgaactgccgggcatttcgacggacataggcgagtacgccgcctctctcgcggcatccggtgctgcgtggggcttgaacggggtcgtctgttcggggtatgaagtggagagcatcaagaagcgttgcggcgcatcgttcctgtgcctcactccgggcatccgtcccggtggcggggcagggggtgacgaccagcgccgggtgatgacacccgcacaggcggtgtccgccggttctgactacctcgttgtgggcaggcccgtgactggggctgccgaccccgctgccgcagcgcgcgccatcatggcggagatggctgcggtcaggcgatag

SEQ ID NO: 156107 - protein, 235 aa, Desulfovibrio vulgaris str. Hildenborough
MAELVVALDFPAADVAVDMAGRLRGTAPWMKVGLELFCAAGPDVVRAVADLGFRVFLDLKFHDIPNTVRGAVRSAVRSGADMVNIHLMGGERMARAAVEGLHEGAQTTGSVPLLFGVTVLTSTAQGELPGISTDIGEYAASLAASGAAWGLNGVVCSGYEVESIKKRCGASFLCLTPGIRPGGGAGGDDQRRVMTPAQAVSAGSDYLVVGRPVTGAADPAAAARAIMAEMAAVRR

SEQ ID NO: 156108 - DNA, 684 bp, Acinetobacter sp. ADP1
  CDS (1)..(684): transl_table=11
atgagtattattgttgccttagacgcaaagagccaatatgacgctttgagcattgctgatcagctcgatccatcactttgtcgtgtaaaagtgggcaaagagctttttactcatgatggtccacaaacagtaagaatcttacaagatcgtggttttgagttgtttttagaccttaaatttcatgacattccaaacaccacagcacaggctgtatgtgctgcggcagacttaggtgtatggatggtcaatgttcatgcgtctggcggtcgtaaaatgatggaaacctgtgttgaacgacttaaagctggaaattaccgtactcaacttattgcggtaacggtattaacctctatggggcgtgaagatttacgtgacattggtttagatgttgaaccttttgagcaagttaaacgtctggcacagctaacgcaagaaagcggtctggatggtgtggtatgttctgctcaagaagcaaaaatgttacgtgatttactaggaacagaatttgctttggtcactccaggtattcgacctgagggtgcaaatgcagatgaccaaaaacgcattgtgacgccaaagcaggcaatgttggatggttcgactcatctagtcattggtcgtccaattacaaaatccgaacgaccaaatgaaatgttgaaacagattttatcgagtctggcttaa

SEQ ID NO: 156109 - protein, 227 aa, Acinetobacter sp. ADP1
MSIIVALDAKSQYDALSIADQLDPSLCRVKVGKELFTHDGPQTVRILQDRGFELFLDLKFHDIPNTTAQAVCAAADLGVWMVNVHASGGRKMMETCVERLKAGNYRTQLIAVTVLTSMGREDLRDIGLDVEPFEQVKRLAQLTQESGLDGVVCSAQEAKMLRDLLGTEFALVTPGIRPEGANADDQKRIVTPKQAMLDGSTHLVIGRPITKSERPNEMLKQILSSLA

SEQ ID NO: 156110 - DNA, 744 bp, Pectobacterium atrosepticum SCRI1043
  CDS (1)..(744): transl_table=11
atgaaaaacgagaatctacagcaaaagaatcaaacggtatcatccccgattgttgtcgcgctggactatgccagtcaggatgcggcgctgtcgtttgttgaccgtatcgatccgcaggattgccgtttgaaggtaggcaaagagatgtttaccttatttggtccacagttcgtgcagacgttgcaacagcgcggctttgatgtgtttctcgatctgaaattccacgatattccgaacaccgtcgcgcatgctgtggcggcagccgccgatcttggcgtgtggatggtcaatgtccacgccagcggcggttcgcgtatgatggcagcggcgaaagacgcgctggtgccgtttggtaaagatgcaccgctgctgattgccgtgaccgtgttgaccagtatggacgaagaagatctacgcgggcttggcattaccgttagcccagcggagcaggcggaaaggctggctgtactaacgcataacagtgggttggatggcgtggtgtgctctgcacatgaagcgcagcggttgaagcaggtatgcggtcaggcatttaagctaatcacgccggggattcgccccgcaggtagtgacgttggcgatcagcgccgcatcatgacgcccattcaggcgcagcaggcgggtgtggattacatggtgattggacgtccgatcacccaatcgtcggatccggctcagacgctgtgtgatattcgcgcgtcgctgctaaacggtattgcatcatga

SEQ ID NO: 156111 - protein, 247 aa, Pectobacterium atrosepticum SCRI1043
MKNENLQQKNQTVSSPIVVALDYASQDAALSFVDRIDPQDCRLKVGKEMFTLFGPQFVQTLQQRGFDVFLDLKFHDIPNTVAHAVAAAADLGVWMVNVHASGGSRMMAAAKDALVPFGKDAPLLIAVTVLTSMDEEDLRGLGITVSPAEQAERLAVLTHNSGLDGVVCSAHEAQRLKQVCGQAFKLITPGIRPAGSDVGDQRRIMTPIQAQQAGVDYMVIGRPITQSSDPAQTLCDIRASLLNGIAS

SEQ ID NO: 156112 - DNA, 738 bp, Yersinia pseudotuberculosis IP 32953
  CDS (1)..(738): transl_table=11
atgacgtccgcaactaaaactaataacagtggctcaatatcctccccaattgttgttgcgttggattatgccaataaagacgctgcgttagcctttgctgatcaggttagtccacaggattgccggttaaaagtgggcaaagagatgtttacgctgtacggccccgagcttatccgtgacttacatcagcgcggctttgacgtatttcttgatttgaaattccatgacatccctaatactaccgcgcgtgccgtggctgcggcagcagagttgggggtctggatggtcaatgttcatgccagtggcggtgcccgcatgatgtcggcggcgaaagaagccttattgccttatggtgcacaagcccccttactgattgccgttactgtactgaccagcatggatagcgaagatctgcgggatatcggtattactatcagtccggctgagcaggccgagcggttagcgaaactgacctgggattgcggtttggatggcgtggtgtgctcggctcatgaagcggtgcgtttgaagcaagtttgtggcgaagacttctcgctcgttaccccaggtattcgcccacaaggcagtgaagccggtgaccagcggcggatcatgacacctgaacaggcggtagctgtaggtgttgattacatggtaatcggtcgcccaattacacaatctcctgatccggaaaaaacgctgcgcgaaatattggcatcactgacgaaggtggcataa

SEQ ID NO: 156113 - protein, 245 aa, Yersinia pseudotuberculosis IP 32953
MTSATKTNNSGSISSPIVVALDYANKDAALAFADQVSPQDCRLKVGKEMFTLYGPELIRDLHQRGFDVFLDLKFHDIPNTTARAVAAAAELGVWMVNVHASGGARMMSAAKEALLPYGAQAPLLIAVTVLTSMDSEDLRDIGITISPAEQAERLAKLTWDCGLDGVVCSAHEAVRLKQVCGEDFSLVTPGIRPQGSEAGDQRRIMTPEQAVAVGVDYMVIGRPITQSPDPEKTLREILASLTKVA

SEQ ID NO: 156114 - DNA, 690 bp, Legionella pneumophila str. Paris
  CDS (1)..(690): transl_table=11
atgacacctaaattaatcgttgcgttggattttgataatcaagataacgctttacagttggttgacaaactggatccgaatcattgcgcacttaaggttggaagtgagctttttactctattagggcctcagtttgtaaaagaattggtaagaagagagtttaaagtatttttagatttaaaatttcacgatatccctaatacagttgctaaagcatgccactccgctgcagaattaggggtatggatgataaatgttcatgccatcggtggcttaagaatgttgcaagctgccagagaatctttaaaaacgtatggtaaagacaggcctttgttgattgcagtgactgtgctgaccagttttgaagaaggggagctggccagtgttggtattagtaatacattgcctgagcaagcaacccatctggctatgcttgccagagaggctgggcttgatggtgtggtaagctctgcacatgaagttaaaattataaaacagaagtgtggtgagaattttattaccgttactcctggcataagactgccaaataatctaaaagatgatcaatcgcgagtaatgactccacaacaagccatcagagaaggaagtgattttctggttattggaagaccaattacgcaagcgagcaatcctcatgaggttgtctcagctctattgcgtgatctttga

SEQ ID NO: 156115 - protein, 229 aa, Legionella pneumophila str. Paris
MTPKLIVALDFDNQDNALQLVDKLDPNHCALKVGSELFTLLGPQFVKELVRREFKVFLDLKFHDIPNTVAKACHSAAELGVWMINVHAIGGLRMLQAARESLKTYGKDRPLLIAVTVLTSFEEGELASVGISNTLPEQATHLAMLAREAGLDGVVSSAHEVKIIKQKCGENFITVTPGIRLPNNLKDDQSRVMTPQQAIREGSDFLVIGRPITQASNPHEVVSALLRDL

SEQ ID NO: 156116 - DNA, 696 bp, Photobacterium profundum SS9
  CDS (1)..(696): transl_table=11
atgttagaccctaaagtgattgtcgcactcgactacccgaaccaagatgcagcattagcgtttgtcgaccgtattgagccgggaagctgccgtctaaaagtgggtaaagaaatgttcactttatatggccctgacttcgtgcgtaagttgcatgaatgtggtcactctgtatttttagacctgaaattccatgatattccaaatacttgttcgcgtgctgttgcagctgcggcagagttaggtgtttggatggtgaacgttcatgcaagtggcggtgaacgcatgatggctgcatcacgtgatattcttgagccgtatggtaaagatcgtccgctattgattgcggtaacggtattaaccagtatggaagcatcagatcttgcgggtattggtattgcctgtgcaccacaagaacaagtattaaacttggcaacattaactaaaaacagtggtctcgatggcgtagtctgttcagctcaagaatcaacgatgttgaaatcagcactgggtaaagagtttcagttaattactccaggcattcgtcctgttggtagtgctgctggcgatcagcgtcgtgttatgacaccagttgaagccgttagtgcgggatctgattacttagttatcggccgccctattacacaggcaactgatccttctgctgtattagctgaaatcaatcaatcactggcttaa

SEQ ID NO: 156117 - protein, 231 aa, Photobacterium profundum SS9
MLDPKVIVALDYPNQDAALAFVDRIEPGSCRLKVGKEMFTLYGPDFVRKLHECGHSVFLDLKFHDIPNTCSRAVAAAAELGVWMVNVHASGGERMMAASRDILEPYGKDRPLLIAVTVLTSMEASDLAGIGIACAPQEQVLNLATLTKNSGLDGVVCSAQESTMLKSALGKEFQLITPGIRPVGSAAGDQRRVMTPVEAVSAGSDYLVIGRPITQATDPSAVLAEINQSLA

SEQ ID NO: 156118 - DNA, 720 bp, Anaplasma marginale str. St. Maries
  CDS (1)..(720): transl_table=11
ttgcactttttgacaagtgttcacgtcactacaatgcgcagtagtccgataatttgtgcgctggatatgatggatatcacccgcgcacttgaggtgactaaggcgatatccggcaaggttgccatggtaaaattggggctggagttcttcactgcatacggtattactggtgtgcggcaggtaattgagctcggcgtacccgtgtttcttgacctaaagcttcatgatatcccaaatacggtggttagggccatacattcggtcaaagacttaaatattgccatgcttaccattcacgtgagtggggggaaggacatgatgcgcgccgcggctgatgccttgtctgatacaaatatacttcttgccggggttacggttttgacgagcattggcggcgatgacttcatagatttcggaatacatgagtctttggaatctcacgtcatgaggctggtaggcctggctgtggatgccgggttgcgagctgtggtatgttctgcccatgaagtcggtgtgatacgtggcagatatccggacattacgcttgttgttcccggaattcgctttaattctggagttgatgatcaaaaacggacaaaaacacccatggatgcgctgtcagatggagcgaactatttagttgttggccgtcctgtgacccaaagccctgatccattagccgcgattgacgaaattctccgctctataggggtgcactga

SEQ ID NO: 156119 - protein, 239 aa, Anaplasma marginale str. St. Maries
MHFLTSVHVTTMRSSPIICALDMMDITRALEVTKAISGKVAMVKLGLEFFTAYGITGVRQVIELGVPVFLDLKLHDIPNTVVRAIHSVKDLNIAMLTIHVSGGKDMMRAAADALSDTNILLAGVTVLTSIGGDDFIDFGIHESLESHVMRLVGLAVDAGLRAVVCSAHEVGVIRGRYPDITLVVPGIRFNSGVDDQKRTKTPMDALSDGANYLVVGRPVTQSPDPLAAIDEILRSIGVH

SEQ ID NO: 156120 - DNA, 711 bp, Zymomonas mobilis subsp. mobilis ZM4
  CDS (1)..(711): transl_table=11
atgcccaatactgactttttatccaatcccgtttttgttgccctcgatacaccagacctgaaaaaggctgaaaagctggcgacgatcctccgccctcatgttggcgggatcaagcttggtctggaattttttatggcgcatggccattacggggttgaaaaaatcgcagatcaagggctgcctatttttcttgatctcaaatttcatgatattccgaatacagtggcttctgcgattgaggctttgtttcatgcagtcaagtcgccgcctgctattttaacggttcataccgaaggcggtgaagccatgatgcgcgcggccaaaaaggccgcagacaaaggctcgaaagtggtgggtgtcactattctgaccagtctcgatcaaagtgaccttggtgtgattggcatgacgggaacgccagaatcgcaggttgaaaaactggcacgtctggcacgtagatccggtcttgatggcattgtctgttctggtgaagaagtcgaacaggtgcatgaagaatggcgcgatggcttctttgttgttcccggaatacggcctgccgatagtgtcgtcggtgaccaaaaacgggtttgcacgcctgccgatgctttggatcggggcgcttctattttagttattggccgcccgattacccgtgcagatgaacctgccgaggtggcctcggctattgccagacaattgcgccggaaataa

SEQ ID NO: 156121 - protein, 236 aa, Zymomonas mobilis subsp. mobilis ZM4
MPNTDFLSNPVFVALDTPDLKKAEKLATILRPHVGGIKLGLEFFMAHGHYGVEKIADQGLPIFLDLKFHDIPNTVASAIEALFHAVKSPPAILTVHTEGGEAMMRAAKKAADKGSKVVGVTILTSLDQSDLGVIGMTGTPESQVEKLARLARRSGLDGIVCSGEEVEQVHEEWRDGFFVVPGIRPADSVVGDQKRVCTPADALDRGASILVIGRPITRADEPAEVASAIARQLRRK

SEQ ID NO: 156122 - DNA, 693 bp, Staphylococcus aureus subsp. aureus COL
  CDS (1)..(693): transl_table=11
atgaaagatttaccaattattgcattagattttgaatcaaaagaaaaagtaaatcaatttttagatttatttgatgaatcattattcgtaaaagtaggtatggaacttttttatcaagaaggtcctcaattaattaatgagataaaagaaagaggccatgatgtatttttagatttaaaactgcatgatattcctaatacagttggtaaggcgatggaaggactagctaaattgaatgttgatctggtaaatgttcatgctgctggtggcgtaaaaatgatgtctgaggccattaaaggattaagaaaacataatcaagatacaaaaattattgcagtaacacagcttacgtcaacaacagaagacatgttacgacacgaacaaaatatacaaacatcgattgaagaggccgttttaaattatgccaagttagcaaatgcagctggtttagatggcgttgtttgttcacctcttgaaagtcgtatgttgactgaaaagttaggtacatcatttttaaaagtaacaccaggtattagacctaaaggtgcatctcaaaatgaccaacaccgtattacgacaccggaagaagcaagacagcttggttcgacgcatattgtagtcggtagaccgattacacaaagtgacaatccagtcgaaagttatcataaaattaaagaaagttggttagtataa

SEQ ID NO: 156123 - protein, 230 aa, Staphylococcus aureus subsp. aureus COL
MKDLPIIALDFESKEKVNQFLDLFDESLFVKVGMELFYQEGPQLINEIKERGHDVFLDLKLHDIPNTVGKAMEGLAKLNVDLVNVHAAGGVKMMSEAIKGLRKHNQDTKIIAVTQLTSTTEDMLRHEQNIQTSIEEAVLNYAKLANAAGLDGVVCSPLESRMLTEKLGTSFLKVTPGIRPKGASQNDQHRITTPEEARQLGSTHIVVGRPITQSDNPVESYHKIKESWLV

SEQ ID NO: 156124 - DNA, 711 bp, Gluconobacter oxydans 621H
  CDS (1)..(711): transl_table=11
atgtccaggcgcacacgactgatcgcagccctcgataccgcatcccgctccacagcccaggactgggccgacagcctgaaaaatgacgtcgacgccatcaagctgggtctcgagtttacctatgcctgcggactggatgcggtaaaaaccgtatcggccgggcacgaactgtttctggacctgaagctgcacgacattccccataccgtcgcatcaggtctgactgccctcgccccgctcaggccagccctgacgacaatccatgccagtggcggttccgaaatgatcgcccggtcccgggaagctcttgagagcgcttttcccgctgacacaaaacgcccgaaactgcttgccgttacggttctgacgagcatgaacgctgagggtctgttggacatcggcgtcaacgccacgccccaggaacaggtgctcagacttggaaaactggctatcagcgctggtgccgacggtctggtctgttcggcgcatgagattgcgcctctacgcgatgcattgggtgacgagcccgttctggtcgtgccgggcatccgtcctgctggcagcgcgtccgacgaccagaagcgcatcatgacgcccggacaggctgcccaagccggcgccgactggatcgtcgtagggcgccccatcacgaaagccgcagatccagttctggccgccagagccatcatggaggaactggccagcgcatga

SEQ ID NO: 156125 - protein, 236 aa, Gluconobacter oxydans 621H
MSRRTRLIAALDTASRSTAQDWADSLKNDVDAIKLGLEFTYACGLDAVKTVSAGHELFLDLKLHDIPHTVASGLTALAPLRPALTTIHASGGSEMIARSREALESAFPADTKRPKLLAVTVLTSMNAEGLLDIGVNATPQEQVLRLGKLAISAGADGLVCSAHEIAPLRDALGDEPVLVVPGIRPAGSASDDQKRIMTPGQAAQAGADWIVVGRPITKAADPVLAARAIMEELASA

SEQ ID NO: 156126 - DNA, 678 bp, Wolbachia endosymbiont strain TRS of Brugia malayi
  CDS (1)..(678): transl_table=11
atgaatccaataatatgcgcactagacacgcaagacttaaatgaggccatatccttggctaatactttgcgtgacaaggttggcatgataaagctggggttagaatttttcgccgctcatggtccttctggagtgagagaagttgcaaagtgcaatgtaccaacttttttggatctgaaattgcacgacattccaaacactgtagctaaaacagttgaagcgataaaagttctgaatattgaaatattaacattacatatcagcggtggaacaaaaatgcttgaagaggctctaagtatagtgaaagacacaaaaacgaaactaattggagtaacagtattaaccagtatgagcaatgaggatttgagcgaacttggaatagcaagagaggtaaaatcacaggtaattctgtttgcaaagcttgcaaagaaggttggactacacggaatagtctgctcggcattagaagctcaagaagtgtatcaagaatgtggtaaagactttaaaattattacttcaggaattcgtgtaggttttggtcatgatgaccaaaaaaggacagcgacaccaaaagaagcaataaattcaggagctgattatattgtaattggtagacctattacaaaaagtaatagtcctgcaaacagtgcagaattaatattgaaatcacttagttaa

SEQ ID NO: 156127 - protein, 225 aa, Wolbachia endosymbiont strain TRS of Brugia malayi
MNPIICALDTQDLNEAISLANTLRDKVGMIKLGLEFFAAHGPSGVREVAKCNVPTFLDLKLHDIPNTVAKTVEAIKVLNIEILTLHISGGTKMLEEALSIVKDTKTKLIGVTVLTSMSNEDLSELGIAREVKSQVILFAKLAKKVGLHGIVCSALEAQEVYQECGKDFKIITSGIRVGFGHDDQKRTATPKEAINSGADYIVIGRPITKSNSPANSAELILKSLS

SEQ ID NO: 156128 - DNA, 705 bp, Vibrio fischeri ES114
  CDS (1)..(705): transl_table=11
atgaaagaccaaaaggtgatcgtggcattggattatgataatcaagcagatgcgttaacgtttgttgataaaattgatccaagttcatgtcgtttaaaagtaggcaaagagatgtttactttatttggccctgagtttgttaaagaacttcataaacgtggtttttctgtttttttagatttaaagtttcatgatattccaaatacctgttcaaaagcggtaagagcggcagcagaaatgggtgtatggatggttaatgttcatgcgagtggtggtgagcgtatgatgagtgcctcgcgtgaaatattagaaccttatggtagtgaccgtccattattaattggtgtgacggtgttaacgagcatggagcagcaagatttagctggtattggtctagacattgcaccacaagaacaagtaaaacgtttagctgcattaacgaaaaacagcggtttagatggtgtcgtatgttcagctcaagaggcatcaatgctaaaagctgatttaggtaaagagttccagttagtaacaccaggaattcgtccagcaggtgctgatgttggtgaccaaaagcgtattatgacgccagtagatgcgattacagcaggttctgactacctagttataggtcgtccgattacacaagcggaaaatccatcacaggtccttaatgagattaatctttctctcgcttcagttttataa

SEQ ID NO: 156129 - protein, 234 aa, Vibrio fischeri ES114
MKDQKVIVALDYDNQADALTFVDKIDPSSCRLKVGKEMFTLFGPEFVKELHKRGFSVFLDLKFHDIPNTCSKAVRAAAEMGVWMVNVHASGGERMMSASREILEPYGSDRPLLIGVTVLTSMEQQDLAGIGLDIAPQEQVKRLAALTKNSGLDGVVCSAQEASMLKADLGKEFQLVTPGIRPAGADVGDQKRIMTPVDAITAGSDYLVIGRPITQAENPSQVLNEINLSLASVL

SEQ ID NO: 156130 - DNA, 738 bp, Salmonella enterica
  subsp. enterica serovar Choleraesuis str. SC-B67
  CDS (1)..(738): transl_table=11
atgacgtttactgcttcatcttcttcctgcgctattactgaatcgcctgtcgttgtggcgttggattaccatgaacgcgataaagccctggcgtttgtcgataaaatcgatcctcgcgattgtcgcttaaaagtgggcaaagagatgttcacgctgtttggtccacaactcgttcgggatctccagcagcgtgggtttgatgtctttcttgatctaaaatttcatgatattcccaacaccacggcccgggcggtcgctgcagcggcagacctgggcgtctggatggtaaacgttcatgcgtctggcggggcgagaatgatggccgcagcgcgcgacgcgctggcgccattcggtaaagatgcgccgttgctcattgccgtgaccgtgttgaccagtatggaaaccagcgatctgcgcgatctgggcgtgacgttgtcaccggcggaacatgcggagcggttggtgcgcctgacgcagcaatgcgggctggatggcgtggtctgttccgctcaggaagcggtcagatttaaacaggtctttggcgctgcatttaagctggtgacgccgggcattcggcccgcaggcagcgaggcaggcgaccagcgacgcattatgacgcccgaacaggcattatccgctggcgtcgactatatggtgattggccgcccggttacgcaatcggtagatccggcgcaaacgctgaaggatattaacgcgtcactgaaacgggaggcataa

SEQ ID NO: 156131 - protein, 245 aa, Salmonella enterica
  subsp. enterica serovar Choleraesuis str. SC-B67
MTFTASSSSCAITESPVVVALDYHERDKALAFVDKIDPRDCRLKVGKEMFTLFGPQLVRDLQQRGFDVFLDLKFHDIPNTTARAVAAAADLGVWMVNVHASGGARMMAAARDALAPFGKDAPLLIAVTVLTSMETSDLRDLGVTLSPAEHAERLVRLTQQCGLDGVVCSAQEAVRFKQVFGAAFKLVTPGIRPAGSEAGDQRRIMTPEQALSAGVDYMVIGRPVTQSVDPAQTLKDINASLKREA

SEQ ID NO: 156132 - DNA, 735 bp, Pseudomonas syringae pv. syringae B728a
  CDS (1)..(735): transl_table=11
atgcgcgccgatttcgacttacctgagaccacgctcatgtccgcctgccagactcctgtcatcgtcgccctggattttccgacccgcgaagccgccttgcgcctggctgatcagctcgaccccaaactgtgcagggtcaaggtcggcaaggaactgttcaccagttgcgcggccgacatcgtcgagaccctgcgccacaggggcttcgaagtgtttctggatctcaaattccacgacatccccaacaccacggcgatggcggtcaaggcggcggccgagatgggcgtgtggatggtcaatgtgcactgctcgggcggcttgcgcatgatggcggcctgtcgggaagtgcttgagcagcgcaccggtccacagccgttgctgatcggcgtgaccgttctgaccagcatggaacgtgaagacctggccggtatcggcctggacatcgacccgcaggtacaggtgctgcgccttgcggctctggccgggaaggccggaatggatggtctggtctgctcggcactggaagcgcaggccctgaaagccgctcacccgtcgttgcaactggtgacgcccggcatccgtccggcgggcagtgcgcaggacgatcagcgccgtatcctgacccctcgtcaggcactggatgcaggctctgactacctcgtcatcggccgcccgatcagccaggcggctgatccggcgaaggccctggcggcggtggttgccgagctggcttga

SEQ ID NO: 156133 - protein, 244 aa, Pseudomonas syringae pv. syringae B728a
MRADFDLPETTLMSACQTPVIVALDFPTREAALRLADQLDPKLCRVKVGKELFTSCAADIVETLRHRGFEVFLDLKFHDIPNTTAMAVKAAAEMGVWMVNVHCSGGLRMMAACREVLEQRTGPQPLLIGVTVLTSMEREDLAGIGLDIDPQVQVLRLAALAGKAGMDGLVCSALEAQALKAAHPSLQLVTPGIRPAGSAQDDQRRILTPRQALDAGSDYLVIGRPISQAADPAKALAAVVAELA

SEQ ID NO: 156134 - DNA, 693 bp, Haemophilus influenzae 86-028NP
  CDS (1)..(693): transl_table=11
atgacaagcaaaattattgtggcattggattatgagaaagaagcagaggctcttgctttagttgatcaaattgatccaagtttgtgtcgattaaaagtgggtaaagaaatgtttactacacttggtattaattttgtaaaacaattacatcaacgtaactttgatgtttttttggatcttaaatatcacgatattccaaatacggtagcaagagcagttcgttctgctgctgatttaggcgtatggatggtggatttacacgcaagtggtggtttgcgtatgatggaagaggcgaagaaaattcttgaaccttatgggaaagatgcaccattgcttattgccgtgacggtattaaccagtatggaagatttggatttattacaaattgggattaatgcatcgccaatggaacaagttttacgcttagctcatttaacccaacgggcgggtttagatggtgtagtctgttcccctcaagaagttgaaattttacgtaatacttgtggtaaagagtttaaattagttacaccggggattcgtccaataggaactgattttggtgatcaacgacgtgtgatgacgcctactgcagcaattcgtgcaggttcagattatttagttattggacgccctataactcaagcggataatcctgcggaggttctccgttctattaatgtatctattgggtaa

SEQ ID NO: 156135 - protein, 230 aa, Haemophilus influenzae 86-028NP
MTSKIIVALDYEKEAEALALVDQIDPSLCRLKVGKEMFTTLGINFVKQLHQRNFDVFLDLKYHDIPNTVARAVRSAADLGVWMVDLHASGGLRMMEEAKKILEPYGKDAPLLIAVTVLTSMEDLDLLQIGINASPMEQVLRLAHLTQRAGLDGVVCSPQEVEILRNTCGKEFKLVTPGIRPIGTDFGDQRRVMTPTAAIRAGSDYLVIGRPITQADNPAEVLRSINVSIG

SEQ ID NO: 156136 - DNA, 693 bp, Staphylococcus haemolyticus JCSC1435
  CDS (1)..(693): transl_table=11
atgaaagatttacctatcatagcattagatttcgaatcggcaactaaagttaatacattcttggaccaatttgatgaaccacttttcgtgaaaattggaatggaacttttctatcaagcgggccccgatttgattaaatcgattaaatctcgtggccatgacatattcttagatttgaagctacatgatattccaaacacggttgaaaaagcaatggaaggcttaggaaagttagatgtagacttagttaatgtgcatgcagctggaggtacagacatgatgaaagctgcagtaaggggtttgcacaaatatagtaatgatacaaagatcattgctgtgacgcaattaacatctacaacagaagaaatgctacgtaatgaacaaaacattcagacgacgattgaagaagcagtgttaaactatgctactttaacacaacaagcaggtctagatggtgtggtttgttctccacttgaagcagaattgctaacaaacaaattaggttctaatttcttaaaagttacaccaggcattagaccacagggggcagctgtagatgatcaaaaacgtattactacacctgaagatgctaaacaattaggggcaacacatatcgtagttgggcgacctatcacccaaagcgagaatcctgtggaaagttatcatactattaaagaaagttggttaggttaa

SEQ ID NO: 156137 - protein, 230 aa, Staphylococcus haemolyticus JCSC1435
MKDLPIIALDFESATKVNTFLDQFDEPLFVKIGMELFYQAGPDLIKSIKSRGHDIFLDLKLHDIPNTVEKAMEGLGKLDVDLVNVHAAGGTDMMKAAVRGLHKYSNDTKIIAVTQLTSTTEEMLRNEQNIQTTIEEAVLNYATLTQQAGLDGVVCSPLEAELLTNKLGSNFLKVTPGIRPQGAAVDDQKRITTPEDAKQLGATHIVVGRPITQSENPVESYHTIKESWLG

SEQ ID NO: 156138 - DNA, 696 bp, Colwellia psychrerythraea 34H
  CDS (1)..(696): transl_table=11
atgaacgatccaaaagtagttgtcgccttagactttgatagaaaacaagatgccttatcttttgttgataagattcagcctacagatgcccgcttgaaagttggcaaagaaatgtttacttatttcggccctgaatttgttaagcaattaacaggtaagggatttgatgtttttcttgatcttaaatttcatgatatccctaacacggtagcaaaagcggttacggctgcggcagacttaggtgtatggatggtgaatgttcatgccagtggtggtagtcagatgatgactaaagcaaaacaagcattagataattatggcaacgatgcgccattattaatagcggtaaccgtacttacaagtatgggtcaagaagaccttcatggcttaggtattaataaaacaccagcagagcaagttaactttttagctaacttaacaaaacaaagcggcttagatggcgttgtttgttcagcttgggaagcagagcaattaaaggctgacttgggtaaagagtttaaactgattacgccaggaattagacctgcgggctcagcacaagacgatcaacaacgtattatgactccaaaacaggcaattgatgttggcgtagactatttggtgatcggacgtccaattaccaaagctgttgatcctcaattagtattacaacaaattaacggtaccatccgctaa

SEQ ID NO: 156139 - protein, 231 aa, Colwellia psychrerythraea 34H
MNDPKVVVALDFDRKQDALSFVDKIQPTDARLKVGKEMFTYFGPEFVKQLTGKGFDVFLDLKFHDIPNTVAKAVTAAADLGVWMVNVHASGGSQMMTKAKQALDNYGNDAPLLIAVTVLTSMGQEDLHGLGINKTPAEQVNFLANLTKQSGLDGVVCSAWEAEQLKADLGKEFKLITPGIRPAGSAQDDQQRIMTPKQAIDVGVDYLVIGRPITKAVDPQLVLQQINGTIR

SEQ ID NO: 156140 - DNA, 687 bp, Ehrlichia canis str. Jake
  CDS (1)..(687): transl_table=11
atgtggtgtaatccaattatttgtgctttagacacttatgatattaatcatgcattgcggttgacaaaaatgctttatggtaaaatatcaatggtaaaattaggattggaattttttactgcacatgggttatctggtgtgcaagcagtctctgattgtggtattccaatatttcttgacttaaaattacatgatattcctaatactgttggtaaggctatatcagtgattaaatctttaaatattgctatgcttactattcatattagtggtggtagagatatgatgctaagtgctatagatagtatatttggtagtatgataaaattaataggtgtcactgtgttaacaagtattgatgattctgatttaaaagacatcggtattgatagatcatctattcaacatgtaatgctgttgtctaaagtggctcaagaaattggattatatggcatagtttgttctgcttttgaggtacaggaagtacgtaatcagtgtggcaaagattttaaacttgtagttcctggtataagatttgaagatgattatagtgatcaaaagagagtgaaaaatcccaaagatgcgattctagctggtgcagattatttagtaattggtcgtccaattactatgagtagtgatcctatacaaacagttgatgcaattttatcttcaattaatttataa

SEQ ID NO: 156141 - protein, 228 aa, Ehrlichia canis str. Jake
MWCNPIICALDTYDINHALRLTKMLYGKISMVKLGLEFFTAHGLSGVQAVSDCGIPIFLDLKLHDIPNTVGKAISVIKSLNIAMLTIHISGGRDMMLSAIDSIFGSMIKLIGVTVLTSIDDSDLKDIGIDRSSIQHVMLLSKVAQEIGLYGIVCSAFEVQEVRNQCGKDFKLVVPGIRFEDDYSDQKRVKNPKDAILAGADYLVIGRPITMSSDPIQTVDAILSSINL

SEQ ID NO: 156142 - DNA, 738 bp, Shigella sonnei Ss046
  CDS (1)..(738): transl_table=11
atgacgttaactgcttcatcttcttcccgcgctgttacgaattctcctgtggttgttgcccttgattatcataatcgtgatgacgcgctgtcctttgtcgacaagatcgacccacgcgattgtcgtctgaaggtcggcaaagagatgtttacattgtttgggccacagtttgtgcgcgaacttcaacagcgtggttttgatatctttcttgacctgaaattccacgatattcctaacactgcagcgcacgctgtcgctgctgcagctgacttaggcgtgtggatggtgaatgttcatgcctctggtggggcgcgtatgatgaccgcagcgcgtgaggcactggttccgtttggcaaagatgcaccgcttttgattgctgtgacagtgttgaccagcatggaagccagcgacctggtcgatcttggcatgacactgtcacctgcagattatgcagaacgtctggcggcactgacgcaaaaatgtggccttgatggtgtggtgtgttctgctcaggaagctgtgcgctttaaacaggtattcggtcaggagttcaaactggttacgccgggcattcgtccgcaggggagtgaagctggtgaccagcgccgcattatgacgccagaacaggcgttgtcggctggtgttgattatatggtgattggtcgcccggtaacgcaatcggtagatccagcgcagacgctgaaagcgatcaacgcctctttacagcggagtgcatga

SEQ ID NO: 156143 - protein, 245 aa, Shigella sonnei Ss046
MTLTASSSSRAVTNSPVVVALDYHNRDDALSFVDKIDPRDCRLKVGKEMFTLFGPQFVRELQQRGFDIFLDLKFHDIPNTAAHAVAAAADLGVWMVNVHASGGARMMTAAREALVPFGKDAPLLIAVTVLTSMEASDLVDLGMTLSPADYAERLAALTQKCGLDGVVCSAQEAVRFKQVFGQEFKLVTPGIRPQGSEAGDQRRIMTPEQALSAGVDYMVIGRPVTQSVDPAQTLKAINASLQRSA

SEQ ID NO: 156144 - DNA, 738 bp, Thiobacillus denitrificans ATCC 25259
  CDS (1)..(738): transl_table=11
atgacgcacaagattatcgtcgcgctggattttccggcgggtgccccggcgctggcactggcggatcggctcgatcccgcacgatgccggctcaaggtcggcaaggagttgttcacggcagccggacccgatctcgtgcgcgcgctggtcgcgcgcggcttcgaggtctttctcgatctcaagtttcacgatatcccgaataccgtcgccgccgcgtgccgcgcggccgcgggactcggcgtgtggatgctcaacgtccacgccgcgggcggtcggcgcatgatggacgccgcccgcgaggcgctcgaatccctgcccccgggggatggcgccgcggatacgccgcaacgccctttgctgatcgcggtcactgtgttgacgagcatgagcgccggcgacctcgccgagaccggcgtcgccgacacgccggccgagcaggtgatgcggctcgcccgcctcgcacacgcctgcgcgctcgacggcgtcgtctgctccgcgcaggaggccgcaggtctgcgtgccgcgctcggcgcggacttccgtctggtcaccccggggattcgcccggcgggcgccgcagcggcggaccagcgccgcgtgatgacgccggtcgaggcgctgcgcgccggagccaccgatctggtgatcggccgccccatcaccggcgcgggcgatccgctcgcggcgctcgcggcgattcaagcggacattgaagaaaatctagggagagcgttttga

SEQ ID NO: 156145 - protein, 245 aa, Thiobacillus denitrificans ATCC 25259
MTHKIIVALDFPAGAPALALADRLDPARCRLKVGKELFTAAGPDLVRALVARGFEVFLDLKFHDIPNTVAAACRAAAGLGVWMLNVHAAGGRRMMDAAREALESLPPGDGAADTPQRPLLIAVTVLTSMSAGDLAETGVADTPAEQVMRLARLAHACALDGVVCSAQEAAGLRAALGADFRLVTPGIRPAGAAAADQRRVMTPVEALRAGATDLVIGRPITGAGDPLAALAAIQADIEENLGRAF

SEQ ID NO: 156146 - DNA, 717 bp, Anabaena variabilis ATCC 29413
  CDS (1)..(717): transl_table=11
atgactaataacaaaataattgtggctttggatgtgccggatacggagagtgcgatcgctctcattgataagttagagtcggtgactttctggaaggttggcttggaattgtttactagttccgggccgagaattctagaagtgctgaaatctagacaaaagcgtatctttctcgatttaaaatttcacgacattcctaataccgtggctggggcttgccgtggtgcagcccgctacggggtggatttgatgacaattcatgctacctctggcagagatgccctcaaggctgcgaaagaggcggtagaggaaggggctgcacaagctggggtgaaaccgtctaagttaattgctgtgacggtgttaaccagtatttctgctagacagttggcgttagatttgaaaattcctgtagagttgccagaatatgctttagatatggcgttgatggcgcaagaagtaggattagatggggctgtttgttcaccccaggaagtggcgcagttgcggcaaatttgcggtgatgactttgtgctggtttgtccgggagtacgtccaacatgggcagaagcaaaagaccaaaagcgatcgctcaccccctcccaagccatccaagccggggctgattatttagtaattggtcgtcccattactgctgctgctgaacctgagttagcctggaaacgaattgctcaagagttaactacagtggcatga

SEQ ID NO: 156147 - protein, 238 aa, Anabaena variabilis ATCC 29413
MTNNKIIVALDVPDTESAIALIDKLESVTFWKVGLELFTSSGPRILEVLKSRQKRIFLDLKFHDIPNTVAGACRGAARYGVDLMTIHATSGRDALKAAKEAVEEGAAQAGVKPSKLIAVTVLTSISARQLALDLKIPVELPEYALDMALMAQEVGLDGAVCSPQEVAQLRQICGDDFVLVCPGVRPTWAEAKDQKRSLTPSQAIQAGADYLVIGRPITAAAEPELAWKRIAQELTTVA

SEQ ID NO: 156148 - DNA, 705 bp, Pseudoalteromonas haloplanktis TAC125
  CDS (1)..(705): transl_table=11
atgcctttcgaaaaatcaaaaaaaattcttattgcactcgattacgatgatcagcaagccgctttagactttgtaaaacagctatcacccgattcatgtcgccttaaagtaggcaaagaaatgtttacttactttggccctgcatttgtaaaagagttaattgatttaggttttgatgtatttttagatttaaaatttcatgatattcctaacacagtggcaaaagcagtgactgcggcggcaaaaatgggtgtatggatggttaatgtgcatgcaagtggtggctttgagatgatgagcaaagctaaacaagcactagctccatttggcgataaagccccattattaattgctgttaccgtgctaacgagtatggatgagacagagttaaagcgtttaggcgtagaaaaaacaccacaagagcaagttatttatttagcgaagctggcaaaagaagcaggacttgatggtgttgtttgctctgctcaagaagcacaacaattaaaagcagagttaggcgcaggctttaagctagtaacgcctggtattcgcccagtagggagtgatgctggcgatcaaaaacgcattatgactcctaaacaagctatagatgcaggcagcgattacttggtgatcggacgtccaattactcaagcagacaatcctgttgctgttttggcagatgttaataaatctatagaataa

SEQ ID NO: 156149 - protein, 234 aa, Pseudoalteromonas haloplanktis TAC125
MPFEKSKKILIALDYDDQQAALDFVKQLSPDSCRLKVGKEMFTYFGPAFVKELIDLGFDVFLDLKFHDIPNTVAKAVTAAAKMGVWMVNVHASGGFEMMSKAKQALAPFGDKAPLLIAVTVLTSMDETELKRLGVEKTPQEQVIYLAKLAKEAGLDGVVCSAQEAQQLKAELGAGFKLVTPGIRPVGSDAGDQKRIMTPKQAIDAGSDYLVIGRPITQADNPVAVLADVNKSIE

SEQ ID NO: 156150 - DNA, 816 bp, Nitrosococcus oceani ATCC 19707
  CDS (1)..(816): transl_table=11
atggtaagaagctcctgtcagagcactgaaggtctagaacataaccaaaaccaggagcaagaatcagcctgcaacggtaggctccctcagctctgcattaaatcactggagaatattatggaaaagtctcgtattattattgccttggattatcccaacgaggaacaagcactaagcctcgtccgccagctcgatcctgcccaatgccggctaaaggtaggcaaagaattatttacccgggccgggccctcattagtaaagcgccttgctgcccaaggctttcctatctttctcgatttaaaattccatgacatcccccatacggttgcccgcgcctgtcttgccgctgccgatttgggggtatggatgctcaatatccatgccctaggcgggttatccatgatgaaggctgcccaggaggcactggctaatcacccctcccacccccaactaatcgctgtcaccgtcttaaccagcatggatcaggcggccttgagccaaataggattagcgggaacacctgaagataatgtactgcaactagccctgctcacccaggaagcgggcctcgacgggatagtatgctccggccaagaagccccggcgctccgacaaaccttagggaaagaattcttactagttactccaggaattcgccccgccggcgcggctccaaaagatcaacagcgggtactaacacccagggaagcgctggcaaaaggggccaattacctggtcattggccgacccatcaccgcagcccctgatcccatgatggccctgagagcaattgaggcagaaatttcgaatgtctaa

SEQ ID NO: 156151 - protein, 271 aa, Nitrosococcus oceani ATCC 19707
MVRSSCQSTEGLEHNQNQEQESACNGRLPQLCIKSLENIMEKSRIIIALDYPNEEQALSLVRQLDPAQCRLKVGKELFTRAGPSLVKRLAAQGFPIFLDLKFHDIPHTVARACLAAADLGVWMLNIHALGGLSMMKAAQEALANHPSHPQLIAVTVLTSMDQAALSQIGLAGTPEDNVLQLALLTQEAGLDGIVCSGQEAPALRQTLGKEFLLVTPGIRPAGAAPKDQQRVLTPREALAKGANYLVIGRPITAAPDPMMALRAIEAEISNV

SEQ ID NO: 156152 - DNA, 735 bp, Pelobacter carbinolicus DSM 2380
  CDS (1)..(735): transl_table=11
atgcttgtcgaagcgcgtaaaaaattgatctttgcccttgatgtcgagtcgggggcatcggcggaagaatgggtgcggcgcctgcgtggcaaagtcggagtatttaaagtcggcaaacagctctttacccgatgcgggcccgatgtggttcgcatgatccgggaccatggcggcgaggtttttctcgatctgaaattccatgatattcccaataccgttgccaaggccgccattgaggcgtgtcgtctcggggtgcgcatgttcaatgtgcatgccttgggtgggcgtgcgatgatggcgggggcagccgaggcggtgagagaatactttgccgccggtgaggatgtgccgccgttgctcctgggggttacgatcttgacttcttccagcgaagaaacgttgcgggaggtcggtgtcgacaggcctgtcgaagaaatggtacctcgcctggcatgtctggcgaagggggcagggctcgatggcgtcgtagcctcgccgcgggaagtcggcttgatacgccgggcctgcgggcgcgattttgctatcgtgacaccgggggtgcggccctctttcgcggaaacaaacgatcagcagcgcattatgaccccgggtgaggcgattgctgccggatccgatttcctggtggtcggtcggcccatcgctgcatccgaagatccggtgggcgctgctcagcgtatcgtggaagagatggcagccgcgttggaagagggctga

SEQ ID NO: 156153 - protein, 244 aa, Pelobacter carbinolicus DSM 2380
MLVEARKKLIFALDVESGASAEEWVRRLRGKVGVFKVGKQLFTRCGPDVVRMIRDHGGEVFLDLKFHDIPNTVAKAAIEACRLGVRMFNVHALGGRAMMAGAAEAVREYFAAGEDVPPLLLGVTILTSSSEETLREVGVDRPVEEMVPRLACLAKGAGLDGVVASPREVGLIRRACGRDFAIVTPGVRPSFAETNDQQRIMTPGEAIAAGSDFLVVGRPIAASEDPVGAAQRIVEEMAAALEEG

SEQ ID NO: 156154 - DNA, 723 bp, Carboxydothermus hydrogenoformans Z-2901
  CDS (1)..(723): transl_table=11
atgtctgaaagattaattgtggcgttagatgtttctgataaggaaaaagcaatggatatagttgaagagttaaaggatgtggtttccttttttaaggttgggatggagttattttaccgggaggggcctaaattaatagatgacctaaaaaatttggggctgaaagtatttttggacttgaaacttcacgatattcccaataccgtagcaagagcattaaaaaacttaatagacttagaagttgatatggttaacatccatgccctgggtggaaaagaaatgttaagagcagcatatttggtaaaggatgaggcattaaaaagaaaaggcaaagccccaataattctcggggttactgttcttaccagcatgaatcaggagagtttggagcaagttgggtttaaaattaaactatctcaattagtggcaattttagctaaagagaccaaagaagctggtttggatggggttgtggcttcagctcaggaagttgctttaataaaaagtatttgcggtacggaatttatcaccgtaactcctggaattcgccgttttgaagatgctaattttgaccagaagcgagtattaactcctaaaaaagctctggagcttggagcggattacttggtggtgggaaggccgattattgctgcttccaaccgtagattggccgcccaaaaatatttggaagagatggaaggtgttttgcatggatctttataa

SEQ ID NO: 156155 - protein, 240 aa, Carboxydothermus hydrogenoformans Z-2901
MSERLIVALDVSDKEKAMDIVEELKDVVSFFKVGMELFYREGPKLIDDLKNLGLKVFLDLKLHDIPNTVARALKNLIDLEVDMVNIHALGGKEMLRAAYLVKDEALKRKGKAPIILGVTVLTSMNQESLEQVGFKIKLSQLVAILAKETKEAGLDGVVASAQEVALIKSICGTEFITVTPGIRRFEDANFDQKRVLTPKKALELGADYLVVGRPIIAASNRRLAAQKYLEEMEGVLHGSL

SEQ ID NO: 156156 - DNA, 720 bp, Geobacter metallireducens GS-15
  CDS (1)..(720): transl_table=11
atgacgagagaccaggcccgcgaaaaggtcatttttgcccttgataccggtgaattcgcccatgtgcagtactgggccgaaacgctgtccgacaaggtcgggatgtataaaatcggcaagcaactcttcaccgcctgcggcccagccgcggtgcgaatgatccagaagttcggcggcgaggtctttctcgacctcaagttccacgacatccccaataccgttgccatggcctcggtggaggcggcccgcatgggagttaaacttttcaatctccatgccctgggtggctatgagatgatggcgaaaacagtggaggccctcgacaaggaattcaagggaggggatagggcaaaggtcctggcggtcactattctcacctcttccaccgaggagaccctcaaggatttggggattgaacacaccgtccccgacatggtggtgcggctcgcgacccttgccaggaaagccggcatcgatggcgtcgtggcttcgccccgggagattcccctcatccgcgaagcatgcgggagcgacttcctcattgtcactcctggcgttcgcccgtccttcgcggccctcaatgatcagaagcgggtcatgacgccggcggaggcggtgaaggcggggagtgattatctcgtcatcggccgccccattggtgatgcgccggacccggccgctgccgccgagctgattctcggcgagattgttgccggctga

SEQ ID NO: 156157 - protein, 239 aa, Geobacter metallireducens GS-15
MTRDQAREKVIFALDTGEFAHVQYWAETLSDKVGMYKIGKQLFTACGPAAVRMIQKFGGEVFLDLKFHDIPNTVAMASVEAARMGVKLFNLHALGGYEMMAKTVEALDKEFKGGDRAKVLAVTILTSSTEETLKDLGIEHTVPDMVVRLATLARKAGIDGVVASPREIPLIREACGSDFLIVTPGVRPSFAALNDQKRVMTPAEAVKAGSDYLVIGRPIGDAPDPAAAAELILGEIVAG

SEQ ID NO: 156158 - DNA, 711 bp, Thiomicrospira crunogena XCL-2
  CDS (1)..(711): transl_table=11
atgaaccaatccgtccaacctgatccaaaagttgttgttgcccttgattttcctaaaacccaattagctgaagactttgctcgccaccttgaccctcaactctgtcgactaaaagtaggaaaagagctgtttgcactgggtggcccacaactagttgaaaagctaatcacgcaaggctttgaggtgtttttggatttaaaatatcacgatattccaaatacagtggccatggcttgtcgagccgccgctgaaatgggggtttggatggtcaacgtacacagcttaggcggccgaaaaatgatggaagccgcaaaagaagcggttttatcggcctcccatcaacctcttttgattggtgttaccattcttaccagtatggaaactgaagatttagctgagattgggctgaccggaacaccaaaagaaaacgtgttacgcttggcaaagttggcgcattcttccgggctggacggtgttgtgagctcagcgcaggaagcgtcagatttaagaaaagaaattgggcaagatttttgcctggtaacgcctggaatacgcccagcgaatgccgatgtgaatgatcaaaaacgaattatgacgcctgcggatgcgatggccgctggatcaagttatctggtagtagggcgcccaatcacgcaggcaaaagatcctattgcggtactgaacgaaattaatgcgtcaatcggtagatag

SEQ ID NO: 156159 - protein, 236 aa, Thiomicrospira crunogena XCL-2
MNQSVQPDPKVVVALDFPKTQLAEDFARHLDPQLCRLKVGKELFALGGPQLVEKLITQGFEVFLDLKYHDIPNTVAMACRAAAEMGVWMVNVHSLGGRKMMEAAKEAVLSASHQPLLIGVTILTSMETEDLAEIGLTGTPKENVLRLAKLAHSSGLDGVVSSAQEASDLRKEIGQDFCLVTPGIRPANADVNDQKRIMTPADAMAAGSSYLVVGRPITQAKDPIAVLNEINASIGR

SEQ ID NO: 156160 - DNA, 684 bp, Sulfurimonas denitrificans DSM 1251
  CDS (1)..(684): transl_table=11
atgcaactttgtgtagcccttgatttgccaactaaagaggaaaatttagaacttattggcaagataaaagattatgacgtttggttaaaagtgggtttgcgctcttacataagagatggcgaagattttttaaaagatatcaaaaaaataaaccctgattttaaaatatttttagatctaaaactatatgacataccaaacacaatggctgatgcggcagagtctatcatctctcttggtgttgatatgttcaatgttcatgcgagtgctggaaaaagagcgatgagagaggttatggttagacttgagcgatatgaaaagcgcccaatagttctggcagttactgctcttacctcattcaatgaagatgagtttggcaaaatatatggagatagcatctcaaaaaaagctgatcagtttgcaaaagatgcttacgagagcgggcttgatggagtggtatgttcagcttatgagagcagttctataaaaaacattacaaatagagattttatgacactcacccctgggattcgtccttttggagaagattcaggtgatcaacaaagagtagctgatgtagcatttgcaaaaaatgcacatgtagattttatagtagtaggtcgcccaatctataactctaaaaatccagcagaagtaataagaagaatattagagcaaatttaa

SEQ ID NO: 156161 - protein, 227 aa, Sulfurimonas denitrificans DSM 1251
MQLCVALDLPTKEENLELIGKIKDYDVWLKVGLRSYIRDGEDFLKDIKKINPDFKIFLDLKLYDIPNTMADAAESIISLGVDMFNVHASAGKRAMREVMVRLERYEKRPIVLAVTALTSFNEDEFGKIYGDSISKKADQFAKDAYESGLDGVVCSAYESSSIKNITNRDFMTLTPGIRPFGEDSGDQQRVADVAFAKNAHVDFIVVGRPIYNSKNPAEVIRRILEQI

SEQ ID NO: 156162 - DNA, 738 bp, Shigella dysenteriae Sd197
  CDS (1)..(738): transl_table=11
atgacgttaactgcttcatcttcttcccgcgctgttacgaattctcctgtggttgttgcccttgattatcataatcgtgatgacgcgctgtcctttgtcgacaagatcgacccacgcgattgtcgtctgaaggtcggcaaagagatgtttacattgtttgggccacagtttgtgcgcgaacttcaacagcgtggttttgatatctttcttgacctgaaattccacgatattcccaacactgcagcgcacgctgtcgctgctgcagctgacttaggcgtgtggatggtgaatgttcatgcctctggtggggcgcgtatgatgaccgcagcgcgtgaggcactggttccgtatggcaaagatgcaccgcttttgattgctgtgacagtgttgaccagcatggaagccagcgacctggccgatcttggcgtgacactgtcacctgcagattatgcagaacgtctggcggcactgacgcaaaaatgtggctttgatggtgtggtgtgttctgctcaggaagctgtgcgctttaaacaggtattcggtcaggagttcaaactggttacgccgggcattcgtccgcaggggagtgatgctggtgaccagcgccgcattatgacgccagaacaggcgttggcggctggtgttgattatatggtgattggtcgcccggtaacgcaatcggtagatccagcgcagacgctgaaagcgatcaacgcctctttacagcggagtgcatga

SEQ ID NO: 156163 - protein, 245 aa, Shigella dysenteriae Sd197
MTLTASSSSRAVTNSPVVVALDYHNRDDALSFVDKIDPRDCRLKVGKEMFTLFGPQFVRELQQRGFDIFLDLKFHDIPNTAAHAVAAAADLGVWMVNVHASGGARMMTAAREALVPYGKDAPLLIAVTVLTSMEASDLADLGVTLSPADYAERLAALTQKCGFDGVVCSAQEAVRFKQVFGQEFKLVTPGIRPQGSDAGDQRRIMTPEQALAAGVDYMVIGRPVTQSVDPAQTLKAINASLQRSA

SEQ ID NO: 156164 - DNA, 738 bp, Shigella boydii Sb227
  CDS (1)..(738): transl_table=11
atgacgttaactgcttcatcttcttcccgcgctgttacgaattctcctgtggttgttgcccttgattatcataatcgtgatgacgcgctgtcctttgtcgacaagatcgacccacgcgattgtcgtctgaaggtcggcaaagagatgtttacattgtttgggccacagtttgtgcgcgaacttcaacagcgtggttttgatatctttcttgacctgaaattccacgatattcctaacactgcagcgcacgctgtcgctgctgcagctgacttaggcgtgtggatggtgaatgttcatgcctccggtggggcgcgtatgatgaccgcagcgcgtgaggcactggttccgtttggcaaagatgcaccgcttttgattgctgtaacagtgttgaccagcatggaagctagcgacctggccgatcttggcgtgacactgtcacctgcagattatgcagaacgtctggcggcactgacgcaaaaatgtggccttgatggtgtggtgtgttctgctcaggaagctgtgcgctttaaacaggtattcggtcaggagttcaaactggttacaccgggcattcgtccgcaggggagtgatgctggtgaccagcgccgcattatgacgccagaacaggcgttggcggctggtgttgattatatggtgattggtcgcccggtaacgcaatcggtagatccagcgcaaacactgaaagcgatcaacgcctctttacagcggagtgcatga

SEQ ID NO: 156165 - protein, 245 aa, Shigella boydii Sb227
MTLTASSSSRAVTNSPVVVALDYHNRDDALSFVDKIDPRDCRLKVGKEMFTLFGPQFVRELQQRGFDIFLDLKFHDIPNTAAHAVAAAADLGVWMVNVHASGGARMMTAAREALVPFGKDAPLLIAVTVLTSMEASDLADLGVTLSPADYAERLAALTQKCGLDGVVCSAQEAVRFKQVFGQEFKLVTPGIRPQGSDAGDQRRIMTPEQALAAGVDYMVIGRPVTQSVDPAQTLKAINASLQRSA

SEQ ID NO: 156166 - DNA, 693 bp, Staphylococcus aureus RF122
  CDS (1)..(693): transl_table=11
atgaaagatttaccaattattgcattagattttgaatcaaaagaaaaagtaaatcgatttttagatttatttgatgaatcattattcgtaaaagtaggtatggaacttttttatcaagaaggtcctcaattaattaatgagataaaagaaagaggccatgatgtatttttagatttaaaactgcatgatattcctaatacagttggtaaggcgatggaaggactagctaaattgaatgttgatctggtaaatgttcatgctgctggtggcgtaaaaatgatgtctgaggccattaaaggattaagaaaacataatgaacatacaaaaattattgcagtaacacagcttacgtcaacaacagaagacatgttacgacacgaacaaaatatacaaacatcgattgaagaggccgttttaaattatgccaagttagcaaatgcaactggtttagatggcgttgtttgttcacctcttgaaagtcgtatgttgactgaaaagttaggtgcatcatttttaaaagtaacaccaggcattagacctaaaggtgcatctcaagatgaccaacaccgtattacgacaccggaagaagcaagacagcttggttcgacgcatattgtagtcggtagaccgattacacaaagtgacaatccagtcgaaagttatcataaaattaaagaaagttggttagtataa

SEQ ID NO: 156167 - protein, 230 aa, Staphylococcus aureus RF122
MKDLPIIALDFESKEKVNRFLDLFDESLFVKVGMELFYQEGPQLINEIKERGHDVFLDLKLHDIPNTVGKAMEGLAKLNVDLVNVHAAGGVKMMSEAIKGLRKHNEHTKIIAVTQLTSTTEDMLRHEQNIQTSIEEAVLNYAKLANATGLDGVVCSPLESRMLTEKLGASFLKVTPGIRPKGASQDDQHRITTPEEARQLGSTHIVVGRPITQSDNPVESYHKIKESWLV

SEQ ID NO: 156168 - DNA, 744 bp, Rhodospirillum rubrum ATCC 11170
  CDS (1)..(744): transl_table=11
atgcccatggcacagatgacgcaaaatccggttttcgtcgcgatcgacaccaccgttgtcggcgatgcgaccacccttgccgcccgcctccatgacgaggtcggcggcatcaagcttggactcgagtttttcgcccgcaatgggcacaagggcgtcaaggaggtgtgcagggccggcgccctgccgctgttccttgatctcaagttccatgacatccccaatacggtggccggggcggtgcgcgcggtgatgccgctggcgccggccttgctcaatgtccacgcctgtggcgggcgggcgatgatgatcgccgcgcgcgaggccgcgcaaagcgaggccctggccctggggatcgcgccgcccaagatgatcgccgtgaccgtgctgaccagcatggacgacgacgatctgggcggaaccggcgtcgccggcggcgtgcttgatcaggtgcggcgtttggccgccctgacccgcgacgccgggcttgatggcgtggtctgctcggcccgcgaggcccgggtgctgcgcgccgatttgggcgatgatttcttgctggtgacgccgggggtgcggccgctgtggtcgaccaccaacgaccagaagcgggtggtcaccccgcaagaggcgatggccgagggggccgatgtgctggtgatcggccggccgatcaccggggcgaccgatcccgcccaggcggcgcggctgatcgccggggaaatcgtgggatgggacgtcgggatatga

SEQ ID NO: 156169 - protein, 247 aa, Rhodospirillum rubrum ATCC 11170
MPMAQMTQNPVFVAIDTTVVGDATTLAARLHDEVGGIKLGLEFFARNGHKGVKEVCRAGALPLFLDLKFHDIPNTVAGAVRAVMPLAPALLNVHACGGRAMMIAAREAAQSEALALGIAPPKMIAVTVLTSMDDDDLGGTGVAGGVLDQVRRLAALTRDAGLDGVVCSAREARVLRADLGDDFLLVTPGVRPLWSTTNDQKRVVTPQEAMAEGADVLVIGRPITGATDPAQAARLIAGEIVGWDVGI

SEQ ID NO: 156170 - DNA, 759 bp, Moorella thermoacetica ATCC 39073
  CDS (1)..(759): transl_table=11
ttgccaacactaatgtacctgcaggagatgatccgcatgcatgccaaggacaaaataatcgtcgccctggatgttcccgacctggctgccggggaaaagctggtggaccggctttccccctacgccggcatgtttaaagtcggcctggagtttttcaccgccgccgggccggcggccgtccggatggtaaaggagcgtggtggccgggtatttgccgacctgaagttccacgacatccccaacaccgtggccggagcggcgcgggccctggtgcgcctgggcgtggatatgctcaacgttcacgccgccggcggcaaggccatgctgcaggctgccgccgccgccgtccgggaggaggccgcggccttaaaccgcccggcgccggtaataatcgcggtcactgttttgaccagcctggacagggaagctctacgctgcgaggtgggtatcgagcgagaggtagaagaacaggtggcccgctgggcgctcctggcccgggaggccggcctggacggcgtagtagcctcgccccgggagatccgggccatccgggaggcctgcgggccggagttcgtcatcgtgaccccgggcgtgcgcccggctgggtccgaccggggcgaccagcgccgggtcatgaccccggccgaggccctgcgggagggcgcctcctacctggtcatcggccggcccatcaccgcggcccccgaccccgtcgccgccgcccgggccatcgcggcggaaatagagatggtgaaataa

SEQ ID NO: 156171 - protein, 252 aa, Moorella thermoacetica ATCC 39073
MPTLMYLQEMIRMHAKDKIIVALDVPDLAAGEKLVDRLSPYAGMFKVGLEFFTAAGPAAVRMVKERGGRVFADLKFHDIPNTVAGAARALVRLGVDMLNVHAAGGKAMLQAAAAAVREEAAALNRPAPVIIAVTVLTSLDREALRCEVGIEREVEEQVARWALLAREAGLDGVVASPREIRAIREACGPEFVIVTPGVRPAGSDRGDQRRVMTPAEALREGASYLVIGRPITAAPDPVAAARAIAAEIEMVK

SEQ ID NO: 156172 - DNA, 759 bp, Sodalis glossinidius str. 'morsitans'
  CDS (1)..(759): transl_table=11
atgacgcgcacgattttatcttcctcttcttctttatccccgcaacaggcgggctcgccggtgattgtggcgctggattatgccgatgcccgccaggcgttggcgtttgccgaccgtgtggcgccgtcccaatgccggctaaaaatcggcaaagaaatgtttacccaagcgggaccggcgctggtgcgcgacctgcagcagcgcggtttcgaggtttttctagacctgaaattccacgatatccccaatacggtggccaaagcggtcagcgcggcggcggaactgggggtatggatggtcaatgtacacgccagcggcggtgaacgcatgatggcggcggcgcgggaagcgctagtgccgttcggggctgacgcgcccgtgctcatcgccgtcacggtgctcaccagtatgaatgatgaggatctgcgggggataggtattgccggcagcgcttctgaccacgccgtgcgtcttgccatactggcgcaagcgtgcggcctggatggcgtggtgtgttccgcctgggaagccgcgcggctgaaaaccgactgcggcgcgggtttcgcgctggtgacgccggggatccgccccaccggcagcgacgcgggggaccaacgccgggtgatgacgccgctgcaggcgcagcaggtgggcgtggactatatggtgatcggacgtcctattacccaggccgccgatcccgctgccaccctggcggcgattttgcaggaactgcaacccggaggcgccgatgtctga

SEQ ID NO: 156173 - protein, 252 aa, Sodalis glossinidius str. 'morsitans'
MTRTILSSSSSLSPQQAGSPVIVALDYADARQALAFADRVAPSQCRLKIGKEMFTQAGPALVRDLQQRGFEVFLDLKFHDIPNTVAKAVSAAAELGVWMVNVHASGGERMMAAAREALVPFGADAPVLIAVTVLTSMNDEDLRGIGIAGSASDHAVRLAILAQACGLDGVVCSAWEAARLKTDCGAGFALVTPGIRPTGSDAGDQRRVMTPLQAQQVGVDYMVIGRPITQAADPAATLAAILQELQPGGADV

SEQ ID NO: 156174 - DNA, 756 bp, Syntrophus aciditrophicus SB
  CDS (1)..(756): transl_table=11
atgacgaagactatgtcgaataaggagtcattggagaagcttattttcgccctggatatggggggcggactggatgatgtcatgtcctgggtgcggcgtcttgcgggccatgtcggggtattcaaggtcggcaaggaggcctttacccgtttcggcccacaacttgttcagagtattcaggaaacaggatcgcgggttttcctggatctcaagtttcatgatatccccaatacggtagccagggccgcggaaggggcagtggagctgggggtcgccatgttcaacgtccatgctctgggcgggatgagcatgatgaccgagactgtcgaatccgtgaagaagatggctgggcgccgggaactgcccatgcccctgattctcggggttacggttttgaccagcctcaatgatgaggatcttcagcggcttggttttacctgtacaacgggagagctggtcctgagactggcgcgcatggcgcaggatgccggcctgtccggcgttgtggcttcggcgcaggatgttgaagccatcagagcggcctgcggcaaagactttgtgatcgtaacccccggaatccgtggactggcccgggttgccggtgatgatcagaaacgcgtcctcacggctgaagaagctgtccggcggggatcggattatctggtgatcggcaggcccatccgtacagcggaagaccctgtggctgcggcggatgacttctgccgggaaatcgcacgggggctgagtgcaagataa

SEQ ID NO: 156175 - protein, 251 aa, Syntrophus aciditrophicus SB
MTKTMSNKESLEKLIFALDMGGGLDDVMSWVRRLAGHVGVFKVGKEAFTRFGPQLVQSIQETGSRVFLDLKFHDIPNTVARAAEGAVELGVAMFNVHALGGMSMMTETVESVKKMAGRRELPMPLILGVTVLTSLNDEDLQRLGFTCTTGELVLRLARMAQDAGLSGVVASAQDVEAIRAACGKDFVIVTPGIRGLARVAGDDQKRVLTAEEAVRRGSDYLVIGRPIRTAEDPVAAADDFCREIARGLSAR

SEQ ID NO: 156176 - DNA, 675 bp, Novosphingobium aromaticivorans DSM 12444
  CDS (1)..(675): transl_table=11
atgagcaacccgatctacctcgccctcgaccttccccgcctcgacgcggccgtcgcgctcgcccagaaggtcaagggccatgtcggaggcctcaagctcggcctcgaattcttctgcgcccatggccaccacggcgtccacgaagtcgccaaggtcggcctgccgatcttcctcgacctgaaactgcacgacattcccaacaccgtcgcgggcgccatgcagtcgatccacgtcctcgagcccgccatcgtcaccattcacgccggtggtggccgcgcgatgatggaagacgccaaggccgccgcgggcgagcataccaaggtcgtcgcagtcaccgtcctcaccagcctcgacgatgccgacatgagcacgatgggcgtcggcggctctgcctacgaccaggccatacgccttgccgacctggcccaggaggccgggctcgacggtatcgtctgttccggccacgaagtcggcgcgatccacaagcgctggaagaacggcttcttcgtcgtgccgggcctgcgccccgccgaaggcaagctgggcgaccagaagcgtgccgtcacgccgcgcgccgcgcgcgatgcgggggccagcgttctcgtcatcggccggccgatcagccgcgccgaagatccggtcgctgcggcccgcgcgatcgaagccacgctctga

SEQ ID NO: 156177 - protein, 224 aa, Novosphingobium aromaticivorans DSM 12444
MSNPIYLALDLPRLDAAVALAQKVKGHVGGLKLGLEFFCAHGHHGVHEVAKVGLPIFLDLKLHDIPNTVAGAMQSIHVLEPAIVTIHAGGGRAMMEDAKAAAGEHTKVVAVTVLTSLDDADMSTMGVGGSAYDQAIRLADLAQEAGLDGIVCSGHEVGAIHKRWKNGFFVVPGLRPAEGKLGDQKRAVTPRAARDAGASVLVIGRPISRAEDPVAAARAIEATL

SEQ ID NO: 156178 - DNA, 738 bp, Escherichia coli UTI89
  CDS (1)..(738): transl_table=11
atgacgttaactgcttcatcttcttcccgcgctgttacgaattctcctgtagttgttgcccttgattatcataatcgcgatgccgcgatggcctttgtcgacaagatcgacccacgcgattgtcgtctgaaggtcggcaaagagatgtttacattgtttgggccacagtttgtgcgcgaacttcaacagcgtggttttgatatctttcttgacctgaaattccacgatattcccaacactgcagcgcacgctgtcgctgctgcggctgacttaggcgtgtggatggtgaatgttcatgcctccggtggggcgcgtatgatgaccgcagcgcgtgaggcactggttccgtttggcaaagatgcaccgcttttgattgctgtgacagtgttgaccagcatggaagccagcgacctggccgatcttggcgtgacactgtcacctgcagattatgcagaacgtctggcggcactgacgcaaaaatgtggccttgatggtgtggtgtgttctgctcaggaagctgtgcgctttaaacaggtattcggtcaggagttcaaactggttacgccgggcattcgtccgcaggggagtgatgctggtgaccagcgccgcattatgacgccagaacaggcgttggcggctggtgttgattatatggtgattggtcgcccggtaacgcaatcggtagatccagcgcagacgctgaaagcgatcaacgcctctttacagcggagtgcatga

SEQ ID NO: 156179 - protein, 245 aa, Escherichia coli UTI89
MTLTASSSSRAVTNSPVVVALDYHNRDAAMAFVDKIDPRDCRLKVGKEMFTLFGPQFVRELQQRGFDIFLDLKFHDIPNTAAHAVAAAADLGVWMVNVHASGGARMMTAAREALVPFGKDAPLLIAVTVLTSMEASDLADLGVTLSPADYAERLAALTQKCGLDGVVCSAQEAVRFKQVFGQEFKLVTPGIRPQGSDAGDQRRIMTPEQALAAGVDYMVIGRPVTQSVDPAQTLKAINASLQRSA

SEQ ID NO: 156180 - DNA, 696 bp, Shewanella denitrificans OS217
  CDS (1)..(696): transl_table=11
atgaacaccaacccaattttagtcgccctagattttgatgataaagccgctgcactgcgcttaattgaccagttagatcctagtctttgccgtttaaaggttggtaaagaaatgtttaccctgtttggtcctcagttagtgcgtgatatccatgatcgaggttttgatttgtttctggaccttaaatttcatgacattcctaataccgtggccaaagccgtgagcgccgcagcagaacttggggtgtggatgactaatgtgcatgccagcggtggacttgccatgatgcaggcggctaaaaaagccctcgagccctatggcgataaagcccccttgttgattgcagttactgtgctgacgtccatgagtgatgaagacttagccttgcttgggattaatgtgcccacagttgagcatgtgctgagacttgcaaaactcagccaagatgcaggtcttgatggcgtagtatgttcggctcaagaagccaagctgcttaagcacaattttggcgccgattttaccttagtgaccccaggtattcgccctgttggcagcgaaatcggcgaccaacacagagtgatgacgccgcctcaagcactgcaagcaggttctgattttctggtgataggcagacccattactcaggcaagcgatcccttagcggcactaaaagcaatccatgaatcattggtttaa

SEQ ID NO: 156181 - protein, 231 aa, Shewanella denitrificans OS217
MNTNPILVALDFDDKAAALRLIDQLDPSLCRLKVGKEMFTLFGPQLVRDIHDRGFDLFLDLKFHDIPNTVAKAVSAAAELGVWMTNVHASGGLAMMQAAKKALEPYGDKAPLLIAVTVLTSMSDEDLALLGINVPTVEHVLRLAKLSQDAGLDGVVCSAQEAKLLKHNFGADFTLVTPGIRPVGSEIGDQHRVMTPPQALQAGSDFLVIGRPITQASDPLAALKAIHESLV

SEQ ID NO: 156182 - DNA, 711 bp, Chromohalobacter salexigens DSM 3043
  CDS (1)..(711): transl_table=11
atgtcgccggacctcgatacgccgctgatcatcgcactcgattacccacgcctcgatcaggcactcgctatggccgagcgcctggacccatcgcggtgtcgcgtgaaggtcggcaaggaactgttcacccgcaccgggccccgggttctggaggccttgcacgggctggggttcgaggtctttctggatctcaagtttcacgatattcccaatacggtggccggcgccgtcgaggccgctgccgatcacggcgtatggatggtcaacgtgcatgccggcggcgggcgccgaatgatggaggcggcccgggagcgactggaacgtcgtcggctcggtacccatctgatcgcggtcacggtgttgaccagcatggaacgtgatgacctgatcgaagtgggcgtcgaggccgagccgctgtcacaggtcgagcgtttggcgaggttggcgcagcagagcggcatggcaggcgtggtgtgttccgcgcaggaagcggcggcgttgcgtgctacgtgcggcgacgacttcctgaaggtcacgcccggcatccggccgcgtgcgtcgagtgccgacgaccagcgccgcaccctgaccccgggcgaggcgatggcggccggcagtacgcatctggtggtgggacgcccggtcacgcaggcgccggatccgatggcggcgctggcgaccatcgaacgcgagcttgcggagccgtcgtaa

SEQ ID NO: 156183 - protein, 236 aa, Chromohalobacter salexigens DSM 3043
MSPDLDTPLIIALDYPRLDQALAMAERLDPSRCRVKVGKELFTRTGPRVLEALHGLGFEVFLDLKFHDIPNTVAGAVEAAADHGVWMVNVHAGGGRRMMEAARERLERRRLGTHLIAVTVLTSMERDDLIEVGVEAEPLSQVERLARLAQQSGMAGVVCSAQEAAALRATCGDDFLKVTPGIRPRASSADDQRRTLTPGEAMAAGSTHLVVGRPVTQAPDPMAALATIERELAEPS

SEQ ID NO: 156184 - DNA, 699 bp, Psychrobacter cryohalolentis K5
  CDS (1)..(699): transl_table=11
atgaacaacgcaattaattctcctgtcatcgttgcattagataatatgacaaaggatgcctctcttgcattagctgaccaattagatccggcattatgccgattgaaagtaggtaaagagctgtatacccgctatggccctgagatagtcaaagcactgcatcagcgccaatttgaggtttttttagaccttaaatttcacgatatccccaataccactgcacaagcagtattggctgccgctgagcttggtatatggatggtcaacgtccatgcaagtgccggttacgatgcgatgtcattggcaaaacagcgcttgctagataatgattttgacacgctattgatagcagtgactgtcttaacatctatggacaatgaagcactcatacaaacgggcatcaccgacggcttagaggcacaagtgagccgcttagcacaattaaccaagcaagcatgtcttgatggtgtagtatgctcagcacaagaagcaaaggcattaaaggcattatgtggtcaggactttaaactgattacgcctggtatccgtctgctagatgataatgctgatgatcaaaagcgtatttgtacgccaaaacaggcattacttgatggctctgattatttggtgatagggcgctcaattactcaagcagtagatcctgcagcgaaattacagttaatactccaaagtctctaa

SEQ ID NO: 156185 - protein, 232 aa, Psychrobacter cryohalolentis K5
MNNAINSPVIVALDNMTKDASLALADQLDPALCRLKVGKELYTRYGPEIVKALHQRQFEVFLDLKFHDIPNTTAQAVLAAAELGIWMVNVHASAGYDAMSLAKQRLLDNDFDTLLIAVTVLTSMDNEALIQTGITDGLEAQVSRLAQLTKQACLDGVVCSAQEAKALKALCGQDFKLITPGIRLLDDNADDQKRICTPKQALLDGSDYLVIGRSITQAVDPAAKLQLILQSL

SEQ ID NO: 156186 - DNA, 750 bp, Baumannia cicadellinicola str. Hc (Homalodisca coagulata)
  CDS (1)..(750): transl_table=11
atgacatatgatgttttatctgccatagcttccccaattattgttgctttagactatacgaatattagtaaagcactagcttttgttgatctaatatccccattgtattgtcggctaaaaataggaaaaataatgtttacacgttttggtccagagctaataattaagctacagcaacgtggttttgatatttttcttgatcttaaatatcatgatatcccaaatactgttgctggagcagtatctgctgcagcagatttaggagtatggatgatctccttgcatgctattggcggcgaaaagatgatggctgcagcttgtaatgctctgtctaattttggtttaggagtcccaaaattgattgctgttacagtattaactagtcttagtgatgaggatttgcagattattggtattcctagtactgcatctgattttgcaattaggctagctattttggccaaaaattgtggcctagatggagtagtatgttctgcacaagaagcagaacatattaagaatatatgtggtcatcattttactatagtgacacctggaattcgtttagctactgatgaacttggtgatcaatgtagaattatgacagttcaccaggcacagcaagctggtgttaactatatggtaattggtcgtcctataactcaagctacaaaacctaattgtaggttagttgaaatacttaactcattaaaaattactgctaattcagtcgcattatcttctaactaa

SEQ ID NO: 156187 - protein, 249 aa, Baumannia cicadellinicola str. Hc (Homalodisca coagulata)
MTYDVLSAIASPIIVALDYTNISKALAFVDLISPLYCRLKIGKIMFTRFGPELIIKLQQRGFDIFLDLKYHDIPNTVAGAVSAAADLGVWMISLHAIGGEKMMAAACNALSNFGLGVPKLIAVTVLTSLSDEDLQIIGIPSTASDFAIRLAILAKNCGLDGVVCSAQEAEHIKNICGHHFTIVTPGIRLATDELGDQCRIMTVHQAQQAGVNYMVIGRPITQATKPNCRLVEILNSLKITANSVALSSN

SEQ ID NO: 156188 - DNA, 705 bp, Acidobacteria bacterium Ellin345
  CDS (1)..(705): transl_table=11
atgtcagagatgcgcgaccgcctcatcatcgccctcgacgtcgactccgccgcccaagcccaacaaattgtgcagtccgtcggcgactcggccacgaccttcaaggtcggcaagcagctcttcaccgccgaaggcccccagattgtccgtgatctcgtcgcctcgggcaagaaagtcttcctcgacctcaagttccacgacatccccaacaccgtcggtgccgcgatccggcaggctcgcgagctaaacgtctccatgctgacggtccacgcctccggcggctccaaaatgcttaaggctgcctctgacgccggcggcccggtcctcgtcctcgccgtaaccgtccttaccagcatgaatgacgccgacctctcagagattggcatcgccggaaacgtacaggcgcaggtgctcctgttaggtgccctcgcacgcgccaatggcatccgcggcctcgtcgcctccgcccacgaagcccgcgaactccgccgcgaactcggcgctgacttcgccatcgtcacccccggggttcgccccgcaggtgccgaaaagggcgatcaagcccgggttgtcacccccgcagctgcgctcgaagccggcgccagccacattgtcgtcggccgccctattaccgaagccgccgaccctgccgccgccgcgaaggcgatcatggaagagttagaaggcacgctgcaatcgcgctaa

SEQ ID NO: 156189 - protein, 234 aa, Acidobacteria bacterium Ellin345
MSEMRDRLIIALDVDSAAQAQQIVQSVGDSATTFKVGKQLFTAEGPQIVRDLVASGKKVFLDLKFHDIPNTVGAAIRQARELNVSMLTVHASGGSKMLKAASDAGGPVLVLAVTVLTSMNDADLSEIGIAGNVQAQVLLLGALARANGIRGLVASAHEARELRRELGADFAIVTPGVRPAGAEKGDQARVVTPAAALEAGASHIVVGRPITEAADPAAAAKAIMEELEGTLQSR

SEQ ID NO: 156190 - DNA, 690 bp, Lawsonia intracellularis PHE/MN1-00
  CDS (1)..(690): transl_table=11
atggctaagcttatcgttgccttagattatacatatgcttctgaagcccttgccatggctaatatacttaaaaaacatgttgaatgggtcaaagtagggttagagctctttactcatgaaggacctagtatcattcaattattaaaaagaatggggtttaaggttatgcttgatctcaaactttttgatatcccaaatactgtaaaaggaagtgttcgctcagcttgcttaatggatgtagatatgctcacactccacattttaggtggagaacacatgattaaagctgcactcaatgaagttcaaagttctatacaaaaaaaatcacactctcctcttctctttggagtaacaatacttacaagtataaaacaaggagaactcccaggatataatcaagatattgcatctatggtgcttaatcttgcagcatatggtcagcaatggggtcttcatggtatagtttgttctggccaagaactaacaaaaataaaagcattatacccatctttatcatgtttgacaccaggaatccgtatgtcttatagtcaaaaagacgatcagcatagagttatgactccaagtgaagcagttaaagcaggaagtgactttttagttattggtcgaccaataacacaagcagaacaaccaataaaaatagtagaagacattatatccagtataatgtaa

SEQ ID NO: 156191 - protein, 229 aa, Lawsonia intracellularis PHE/MN1-00
MAKLIVALDYTYASEALAMANILKKHVEWVKVGLELFTHEGPSIIQLLKRMGFKVMLDLKLFDIPNTVKGSVRSACLMDVDMLTLHILGGEHMIKAALNEVQSSIQKKSHSPLLFGVTILTSIKQGELPGYNQDIASMVLNLAAYGQQWGLHGIVCSGQELTKIKALYPSLSCLTPGIRMSYSQKDDQHRVMTPSEAVKAGSDFLVIGRPITQAEQPIKIVEDIISSIM

SEQ ID NO: 156192 - DNA, 696 bp, Pseudoalteromonas atlantica T6c
  CDS (1)..(696): transl_table=11
atgcaagatccaaaagtggttatcgcacttgattttgatgtaaagaaagacgcacttgattttgtagataggattgacccatctcagtgccgtctaaaagtcggtaaagaaatgttcacgtatttcggtcctgagtttgttcgcactttggtggcgaaggagttcgatgtattcctcgatctcaaattccacgatattccaaataccgttgccaaagcgtgcatagccgccgcagatttaggcgtatggatggtgaacgtacatgcttctggtggcgaagatatgatgatacgtgctcgtgaaggcttagctcagttcggtcaagacaagcctcatcttatcgcagtaacagtgcttaccagcatggataagcgtcagctgtcacaaattggtattcaatcatcgcccatggagcacgtgttaacgcttgcatccctaaccaaacaagcaggacttgacggagtggtatgctcggcacaagaagctgcaatgttaaaagagactttgggtaaggaatttatgttggtgactcccggtattcgcccccagggaagtgacgttggtgatcagaaacgtattatgacacctcaagaggctatgcaagttggggtggattacatggttattggccggcctattacgcaagcgaaggatccagtcgctgcgcttgacgctattaatgtatctattgcttga

SEQ ID NO: 156193 - protein, 231 aa, Pseudoalteromonas atlantica T6c
MQDPKVVIALDFDVKKDALDFVDRIDPSQCRLKVGKEMFTYFGPEFVRTLVAKEFDVFLDLKFHDIPNTVAKACIAAADLGVWMVNVHASGGEDMMIRAREGLAQFGQDKPHLIAVTVLTSMDKRQLSQIGIQSSPMEHVLTLASLTKQAGLDGVVCSAQEAAMLKETLGKEFMLVTPGIRPQGSDVGDQKRIMTPQEAMQVGVDYMVIGRPITQAKDPVAALDAINVSIA

SEQ ID NO: 156194 - DNA, 738 bp, Escherichia coli 536
  CDS (1)..(738): transl_table=11
atgacgttaactgcttcatcttcttcccgcgctgttacgaattctcctgtagttgttgcccttgattatcataatcgcgatgccgcgatggcctttgtcgacaagatcgacccacgcgattgtcgtctgaaggtcggcaaagagatgtttacattgtttgggccacagtttgtgagcgaacttcaacagcgtggttttgatatctttcttgacctgaaattccacgatattcccaacactgcagcgcacgctgtcgctgctgcggctgacttaggcgtgtggatggtgaatgttcatgcctccggtggggcgcgtatgatggccgcagcgcgtgaggcactggttccgtttggcaaagatgcaccgcttttgattgctgtgacagtgttgaccagcatggaagccagcgacctggccgatcttggcgtgacactgtcacctgcagattatgcagaacgtctggcggcactgacgcaaaaatgtggccttgatggtgtggtgtgttctgctcaggaagctgtgcgctttaaacaggtattcggtcaggagttcaaactggttacgccgggcattcgtccgcaggggagtgatgctggtgaccagcgccgcattatgacgccagaacaggcgttggcggctggtgttgattatatggtgattggtcgcccggtaacgcaatcggtagatccagcgcagacgctgaaagcgatcaacgcctctttacagcggagtgcatga

SEQ ID NO: 156195 - protein, 245 aa, Escherichia coli 536
MTLTASSSSRAVTNSPVVVALDYHNRDAAMAFVDKIDPRDCRLKVGKEMFTLFGPQFVSELQQRGFDIFLDLKFHDIPNTAAHAVAAAADLGVWMVNVHASGGARMMAAAREALVPFGKDAPLLIAVTVLTSMEASDLADLGVTLSPADYAERLAALTQKCGLDGVVCSAQEAVRFKQVFGQEFKLVTPGIRPQGSDAGDQRRIMTPEQALAAGVDYMVIGRPVTQSVDPAQTLKAINASLQRSA

SEQ ID NO: 156196 - DNA, 738 bp, Shigella flexneri 5 str. 8401
  CDS (1)..(738): transl_table=11
atgacgttaactgcttcatcttcttcccgcgccgttacgaattctcctgtggttgttgcccttgattatcataattgtgatgacgcgctgtcctttgtcgacaagatcgacccacgcgattgtcgtctgaaggtcggtaaagagatgtttacattgtttgggccacagtttgtgcgcgaacttcaacagcgtggttttgatatctttcttgacctgaaattccacgatatccccaacactgcagcgcacgctgtcgctgctgcagctgacttaggcgtgtggatggtgaatgttcatgcctccggtggggcgcgtatgatgaccgcagcgcgtgaggcactggttccgtttggcaaagatgcaccgcttttgattgctgtgacagtgttgaccagcatggaagccagcgacctggccgatcttggcgtgacactgtcacctgcagattatgcagaacgtctggcagcactgacgcaaaaatgtggccttgatggtgtggtgtgttctgctcaggaagctgtgcgctttaaacaggtattcggtcaggagttcaaactggttacaccgggcattcgtccgcaggggagtgaagctggtgaccagcgccgcattatgacgccagaacaggcgttggcggctggtgttgattatatggtgattggtcgcccggtaacgcaatcggtagatccagcgcagacactgaaagcgatcaacgcctctttacagcggagtgcatga

SEQ ID NO: 156197 - protein, 245 aa, Shigella flexneri 5 str. 8401
MTLTASSSSRAVTNSPVVVALDYHNCDDALSFVDKIDPRDCRLKVGKEMFTLFGPQFVRELQQRGFDIFLDLKFHDIPNTAAHAVAAAADLGVWMVNVHASGGARMMTAAREALVPFGKDAPLLIAVTVLTSMEASDLADLGVTLSPADYAERLAALTQKCGLDGVVCSAQEAVRFKQVFGQEFKLVTPGIRPQGSEAGDQRRIMTPEQALAAGVDYMVIGRPVTQSVDPAQTLKAINASLQRSA

SEQ ID NO: 156198 - DNA, 729 bp, Trichodesmium erythraeum IMS101
  CDS (1)..(729): transl_table=11
atgaatattgataatattatagtccctttggatgttccgaatgaggcagcagcgatcgctctgatagaagaactacctgaaataatctggtggaaggttggtctagaattgtttgttagttgtggccctcagattttctcaattcttaaacaacgccagaaaaggatttttctagatttaaagttccatgatatccctaatactgttgctggagtttgtcgatctgctgctagttatggggttgatttgttgactattcatgctactgctggtagagtagctctgagtagggcacagcaagctgttctggaaggggcaaaaattatagggcaaaagccaccaaggttaatagctattactattttgacaagtttgacttctcgtgatttagcttttgacctcaaaattcctttggagttaccagaatatgttttacagatggcattgttggctcaggaatctggtttaagtggggcagtttgttctccccaagaggtagaacagttgaggcgggtttgtggagatgattttttgttagtttgtccaggagtgaggccaagttgggctgaagtaggagaccagaagcgatcgctaactcctgctcaggccattaaggctggtgctaattatctggttataggccgacctattactgctactgctgacccaagagaagctttgaggcgcatttgtcaggaaatttcaggtgatcagaaagaggggagttag

SEQ ID NO: 156199 - protein, 242 aa, Trichodesmium erythraeum IMS101
MNIDNIIVPLDVPNEAAAIALIEELPEIIWWKVGLELFVSCGPQIFSILKQRQKRIFLDLKFHDIPNTVAGVCRSAASYGVDLLTIHATAGRVALSRAQQAVLEGAKIIGQKPPRLIAITILTSLTSRDLAFDLKIPLELPEYVLQMALLAQESGLSGAVCSPQEVEQLRRVCGDDFLLVCPGVRPSWAEVGDQKRSLTPAQAIKAGANYLVIGRPITATADPREALRRICQEISGDQKEGS

SEQ ID NO: 156200 - DNA, 732 bp, Synechococcus sp. CC9311
  CDS (1)..(732): transl_table=11
atggcttcctctttctcggctgaatcagctgaacggatcatcgtggccctcgatgggatggcccctgatcaagcgcttgctttcagtgcgcaggtgcagggattgcgctgggtgaaggtggggctggagctattcgttcaagcggggccagaggtcgtgattcagttgcggaatcagggtctgcgcgtattcctcgatcttaaatttcacgatattccgaccaccatggccggtgcctgtctccgggcggcagcgctgggagccgagctgatcactgtgcatgcctgtgccggcagtgaagccctgcaggcagctcaggccgcggtagtggagggggcgcaaagcaccgggcagccggtgccaacgttattggcggtcactgtgctgaccagttgggaagagcatcggctgcagcgggaactggcggtcgagcaaggcattgccgagcgagtatcacagctcgcccttctggcggcaaaagccggtgttggtggctgcgtgtgttcgccgctggaagttgcctccctcagggctcagcatcgagagccattcgcattggtcaccccaggcattcgtcctcaaggcacttcggtgggcgatcaggtgcgagtgatgactcctccagccgcgattgaggctggagcctctcagctcgtgatcggccgaccgatcactcaatctgagaatccaagtggtgcgttcgcacagtgctgtactgccctatcgacgtga

SEQ ID NO: 156201 - protein, 243 aa, Synechococcus sp. CC9311
MASSFSAESAERIIVALDGMAPDQALAFSAQVQGLRWVKVGLELFVQAGPEVVIQLRNQGLRVFLDLKFHDIPTTMAGACLRAAALGAELITVHACAGSEALQAAQAAVVEGAQSTGQPVPTLLAVTVLTSWEEHRLQRELAVEQGIAERVSQLALLAAKAGVGGCVCSPLEVASLRAQHREPFALVTPGIRPQGTSVGDQVRVMTPPAAIEAGASQLVIGRPITQSENPSGAFAQCCTALST

SEQ ID NO: 156202 - DNA, 696 bp, Shewanella sp. MR-7
  CDS (1)..(696): transl_table=11
atgacgaccaaacctatcctcgtagcgcttgattacgataataaaaaccacgccttacaactgatagatcaactcgatcccaacatgtgccgcctcaaagtgggcaaagaaatgtttaccctgtttggcccccaattggttgaagatattcacgaccgtggtttcgagcttttcctcgacttaaagtttcacgatattcctaatacggtcgccaaagcggtcgcggctgcggcagaactgggcgtgtggatgacaaacgtccatgccagcggtggcttggccatgatggaagcggcgaaaaaagcattgctgccctatggtaatgatgcacctatgctaatcgcagtaactgtccttacttcaatgagtgataaagatttaaaactcatcggcattgatgttccagcctttgagcatgtgcaacgtctcgcgaaactcaccaaacaggcgggccttgatggtgttgtctgttcggcgcaagaggcaagcgcacttaaatcactcttaggtcaagattttaaacttatcaccccggggatccgccctgtgggcagcgacgtgggcgaccaacaccgggtgatgacgccatcgcaggcgcttgcagccggttctgattatttagtgattggtcgaccaatcactaaggccgccgaccctctggctgcactgcaggcgattcatcaatctctagcttga

SEQ ID NO: 156203 - protein, 231 aa, Shewanella sp. MR-7
MTTKPILVALDYDNKNHALQLIDQLDPNMCRLKVGKEMFTLFGPQLVEDIHDRGFELFLDLKFHDIPNTVAKAVAAAAELGVWMTNVHASGGLAMMEAAKKALLPYGNDAPMLIAVTVLTSMSDKDLKLIGIDVPAFEHVQRLAKLTKQAGLDGVVCSAQEASALKSLLGQDFKLITPGIRPVGSDVGDQHRVMTPSQALAAGSDYLVIGRPITKAADPLAALQAIHQSLA

SEQ ID NO: 156204 - DNA, 708 bp, Alkalilimnicola ehrlichei MLHE-1
  CDS (1)..(708): transl_table=11
atgtcccattcccgactgatcattgccctggattaccccgaggccgggccggccctggcgctcgccgatcgcctgagccccgagcgctgcgcgctgaaggtgggcaaggagctgttcgtcgccgaaggcccacagttggtggacgcgctggtccgtcggggttaccgggtctttctcgatctcaagttccacgacatccccaacaccgtcgccggggcctgtcgctcggcggccgccaccggggcgtggatggtcaacgtccacgccctgggcggtgccgcgatgatggcggcggcccgggaggccctgggggagaccggggatcgcccgctgctgaccgcggtcaccgtgctcaccagccacagcgacgcgaccctgcgtgagattggcctggccggcccggcggacgccgccgtctgccggttggccgagctggcccggggcgccggcgtggacggggtggtttgcagtgcccgggaggcggccctggtgcgggagcgctgcggcgacggtttcctgcgggtgaccccgggtatccgcccggcctgggcggcaaagggcgatcaggcgcgggtgctgagcccggccgacgcggtcgcgggcggcgccacccacctggtggtggggcgtccggttacccgcgccgatgagcccctggcggcgctggcgcgcctggagcgcgaactggccgcgcaggacgagacctga

SEQ ID NO: 156205 - protein, 235 aa, Alkalilimnicola ehrlichei MLHE-1
MSHSRLIIALDYPEAGPALALADRLSPERCALKVGKELFVAEGPQLVDALVRRGYRVFLDLKFHDIPNTVAGACRSAAATGAWMVNVHALGGAAMMAAAREALGETGDRPLLTAVTVLTSHSDATLREIGLAGPADAAVCRLAELARGAGVDGVVCSAREAALVRERCGDGFLRVTPGIRPAWAAKGDQARVLSPADAVAGGATHLVVGRPVTRADEPLAALARLERELAAQDET

SEQ ID NO: 156206 - DNA, 699 bp, Shewanella frigidimarina NCIMB 400
  CDS (1)..(699): transl_table=11
atgactgataaatccattgtagtcgccctcgactatgacaataaaaacgacgcattaacctttattgataaacttgatccagagatgtgtcgtttaaaaatcggcaaagagatgtttacgttattcggacctgatctggttaaagacattcacagtcgtgattttgatttatttctcgatttaaagtttcatgatattcccaatacggtagcaaaagctgttgccgctgccgctgatctaggtgtgtggatgactaacgtgcatgccagtggcggcttagccatgatgcaggcagccaaaaaagcattgattccctttggtgacgatgcaccattattgattgccgtcacagtattaacatcgatgtcagatgaagatttagtgttgcttggtattaatgtgcctgcgtttgaacatgtgctgcgcttagccaaattgactcatcaagcaggattagacggggttgtgtgttcggctcaagaagctaaattgcttaaatcatcatttgggcaagattttaccttagttacaccgggtattagacccgcaggaagtgatgccggtgatcaacatcgtgtcatgactccaccccaggctattgcggcagggtcagattatttagtgattggtcgaccaattactcaagctgccgacccattagcagcacttaaagctatttatcaatcactgcatgtttga

SEQ ID NO: 156207 - protein, 232 aa, Shewanella frigidimarina NCIMB 400
MTDKSIVVALDYDNKNDALTFIDKLDPEMCRLKIGKEMFTLFGPDLVKDIHSRDFDLFLDLKFHDIPNTVAKAVAAAADLGVWMTNVHASGGLAMMQAAKKALIPFGDDAPLLIAVTVLTSMSDEDLVLLGINVPAFEHVLRLAKLTHQAGLDGVVCSAQEAKLLKSSFGQDFTLVTPGIRPAGSDAGDQHRVMTPPQAIAAGSDYLVIGRPITQAADPLAALKAIYQSLHV

SEQ ID NO: 156208 - DNA, 720 bp, Syntrophomonas wolfei subsp. wolfei str. Goettingen
  CDS (1)..(720): transl_table=11
ttgcaggcccaagagagaattatattagccctggatgttggtagccgggagcaagccctggcattggttaaggatttggctcctcatgtgggggcatttaaagttgggatgcagttgttcaatagctgcggccccagtatagtagaagagattaatcaattggggggacgggtatttttagatctgaagttccacgatattcctaataccgtagctgctgccggcagggtaataacccgtttgaattgcttcatgtttaatgttcacgccgccggaggccgggaaatgatgcgccaggtagtagaagaggtgaaaaatgaggccaaaaaactagcggtggcagcacccttatccctggctgtaacggtgcttaccagtatatcgcaggagcaactggaagaagagattggggttaaaggaatgaagcttaaagacctggtggtcaagtgggctcttatggctaaagaatgtggaatctctggtgttgtttcatctccgcaagaaatcgaggctatacgggcagcctgtggccctgaatttaaaatcgtcaccccgggtatccgacccgcctggtcggagaaaaatgaccagaaacggattaccacgccaggtcaggccttgcagatgggggctgattttatggtcatcggacggcctattactcaggcagcgaacccggtggaagcggctttaaagattataggcgaattggaggaataa

SEQ ID NO: 156209 - protein, 239 aa, Syntrophomonas wolfei subsp. wolfei str. Goettingen
MQAQERIILALDVGSREQALALVKDLAPHVGAFKVGMQLFNSCGPSIVEEINQLGGRVFLDLKFHDIPNTVAAAGRVITRLNCFMFNVHAAGGREMMRQVVEEVKNEAKKLAVAAPLSLAVTVLTSISQEQLEEEIGVKGMKLKDLVVKWALMAKECGISGVVSSPQEIEAIRAACGPEFKIVTPGIRPAWSEKNDQKRITTPGQALQMGADFMVIGRPITQAANPVEAALKIIGELEE

SEQ ID NO: 156210 - DNA, 714 bp, Lactococcus lactis subsp. cremoris SK11
  CDS (1)..(714): transl_table=11
atgcaagaaaatagacctgttattgccctagatttcccagaattctcagatgtgaaagatttccttgaaaaatttgacccgtctgaaaaactctacatcaaacttggtatggaacttttttataccgccggcccacaagtagtatattatgtgaaatcgctcggtcatagcgttttccttgatttaaaacttcatgatattccaaatacagttgaatcatccatgcgtgttttagcccgtttgggagttgatatggtcaatgttcacgctgctggcggggttgagatgatggttgcagctaaacgcggtttagaagcagggactccaactggacgtcaaagaccaaaactaattgccgttacgcaattaacctcgacttctgaggaaattatgcaaaatgaccaaaaaattatgaccagtcttgaagaatctgtcattaactacgcacaaaaaacagcccaagccggacttgatggtgtcgtttgctccgctcatgaagttgaaaaaattaaagcggcaacatcaaaagaattcatttgtttaacaccgggaattcgtccagaaggagcaagtaaaggcgaccaaaaacgagtaatgacaccaaaagaagcaagaacaattggttcagattacattgttgttggtcgaccaattacacaagcaaaagaccctgtttcagcttatcatgcgataaaggaagaatggaatcaataa

SEQ ID NO: 156211 - protein, 237 aa, Lactococcus lactis subsp. cremoris SK11
MQENRPVIALDFPEFSDVKDFLEKFDPSEKLYIKLGMELFYTAGPQVVYYVKSLGHSVFLDLKLHDIPNTVESSMRVLARLGVDMVNVHAAGGVEMMVAAKRGLEAGTPTGRQRPKLIAVTQLTSTSEEIMQNDQKIMTSLEESVINYAQKTAQAGLDGVVCSAHEVEKIKAATSKEFICLTPGIRPEGASKGDQKRVMTPKEARTIGSDYIVVGRPITQAKDPVSAYHAIKEEWNQ

SEQ ID NO: 156212 - DNA, 786 bp, Escherichia coli APEC O1
  CDS (1)..(786): transl_table=11
atgctcgccgtttacctgtttcgcgccacttccggtgcccatcatcaagaaggtctggtcatgacgttaactgcttcatcttcttcccgcgctgttacgaattctcctgtagttgttgcccttgattatcataatcgcgatgccgcgatggcctttgtcgacaagatcgacccacgcgattgtcgtctgaaggtcggcaaagagatgtttacattgtttgggccacagtttgtgcgcgaacttcaacagcgtggttttgatatctttcttgacctgaaattccacgatattcccaacactgcagcgcacgctgtcgctgctgcggctgacttaggcgtgtggatggtgaatgttcatgcctccggtggggcgcgtatgatgaccgcagcgcgtgaggcactggttccgtttggcaaagatgcaccgcttttgattgctgtgacagtgttgaccagcatggaagccagcgacctggccgatcttggcgtgacactgtcacctgcagattatgcagaacgtctggcggcactgacgcaaaaatgtggccttgatggtgtggtgtgttctgctcaggaagctgtgcgctttaaacaggtattcggtcaggagttcaaactggttacgccgggcattcgtccgcaggggagtgatgctggtgaccagcgccgcattatgacgccagaacaggcgttggcggctggtgttgattatatggtgattggtcgcccggtaacgcaatcggtagatccagcgcagacgctgaaagcgatcaacgcctctttatag

SEQ ID NO: 156213 - protein, 261 aa, Escherichia coli APEC O1
MLAVYLFRATSGAHHQEGLVMTLTASSSSRAVTNSPVVVALDYHNRDAAMAFVDKIDPRDCRLKVGKEMFTLFGPQFVRELQQRGFDIFLDLKFHDIPNTAAHAVAAAADLGVWMVNVHASGGARMMTAAREALVPFGKDAPLLIAVTVLTSMEASDLADLGVTLSPADYAERLAALTQKCGLDGVVCSAQEAVRFKQVFGQEFKLVTPGIRPQGSDAGDQRRIMTPEQALAAGVDYMVIGRPVTQSVDPAQTLKAINASL

SEQ ID NO: 156214 - DNA, 702 bp, Aeromonas hydrophila subsp. hydrophila ATCC 7966
  CDS (1)..(702): transl_table=11
atgctagatcccaaagtactggttgcgctggattatcagcacgaggccgatgccttcgccttcattgaacgtatctccccggcccagtgccgtctcaaggtaggcaaggagatgtttaccctgtttggcccccagttcgtgcgtcagctggttgccaagggatttgatgtctttctggatctgaagtttcacgacattcccaacaccgttgccaaggcggtagccgccagtgccgagctcggcgtctggatggtgaacgtgcacgccagcggtggcgagcggatgatgcgggccgccaaggaggcgctgctgccttatggcgacaaggcgccgctgcttatcggggtgaccgtgctgaccagcatggagcaggccgatatggcgccgttggggctcactgtcggcccggccgagcaggtgatccggctggccaaattgaccaaggaggcggggctcgatggggtggtctgctccgccgaagaggcgcgtgaattgaaggcgctgctcggcgccgacttcaagctggtgacgccggggatccgtcccgctggctcggcagccggtgatcaacgccgggtcatgacaccgctggcggcggtggaggcgggggccgactatctggtgattggccgccccatcacccaggcggccgatcctgccgccatgctggcaggcatcaatgcagagctggcaaatcgataa

SEQ ID NO: 156215 - protein, 233 aa, Aeromonas hydrophila subsp. hydrophila ATCC 7966
MLDPKVLVALDYQHEADAFAFIERISPAQCRLKVGKEMFTLFGPQFVRQLVAKGFDVFLDLKFHDIPNTVAKAVAASAELGVWMVNVHASGGERMMRAAKEALLPYGDKAPLLIGVTVLTSMEQADMAPLGLTVGPAEQVIRLAKLTKEAGLDGVVCSAEEARELKALLGADFKLVTPGIRPAGSAAGDQRRVMTPLAAVEAGADYLVIGRPITQAADPAAMLAGINAELANR

SEQ ID NO: 156216 - DNA, 696 bp, Shewanella sp. ANA-3
  CDS (1)..(696): transl_table=11
atgacgaccaaacctatcctcgtagcgcttgattacgataataaaaaccacgccttacaactgatagatcaactcgatcccaacatgtgccgcctcaaagtgggcaaagaaatgtttaccctgtttggcccacaattggttaaagacattcacgaccgtggtttcgatcttttcctcgacctaaagtttcacgatattcccaatacggtcgccaaagcagttgcggctgcggcagaacttggcgtgtggatgacaaacgtgcatgccagcggtggcttggccatgatggaagcggcgaaaaaagcgttgctgccctatggcaaggatgcacctctgctaatcgcagtaacggtacttacttcaatgagtgatgaagatttaaaactcatcggcattgatgtgccagcttttgaacatgtgcaacgtctcgcgaaactcaccaagcaggcgggccttgatggtgtggtctgttcggcgcaagaggcaaatgtactaaaatcactcttaggtcaagattttaaacttatcaccccggggatccgtccactgggcagcgacgtgggtgaccaacaccgggtgatgacgccaccggaggcgcttgcagccggttctgattatttagtgattggtcgaccaatcactaaggccgccgatcctctggcggcgctgcaggcgattcatcaatctctcgcttga

SEQ ID NO: 156217 - protein, 231 aa, Shewanella sp. ANA-3
MTTKPILVALDYDNKNHALQLIDQLDPNMCRLKVGKEMFTLFGPQLVKDIHDRGFDLFLDLKFHDIPNTVAKAVAAAAELGVWMTNVHASGGLAMMEAAKKALLPYGKDAPLLIAVTVLTSMSDEDLKLIGIDVPAFEHVQRLAKLTKQAGLDGVVCSAQEANVLKSLLGQDFKLITPGIRPLGSDVGDQHRVMTPPEALAAGSDYLVIGRPITKAADPLAALQAIHQSLA

SEQ ID NO: 156218 - DNA, 717 bp, Acidothermus cellulolyticus 11B
  CDS (1)..(717): transl_table=11
atgacgccggacccggtccgcgccggccgcgcaccgatcgcggtcgcgctcgacacacccgatctcgacgaagccagccggtgggcccgactcgtcgaaccgcacgtcagcgcggtcaaggtcgggcttgaactcttcacccgctacggacccgacgccgtggccagcgttcgcggcggcagtgggctggacgtcttcctcgacctcaagctgcacgacattcccaatacggtcgccggcgccgcccgagccgtggcccgggtccgtcccacgtatctgacggtgcacgccgccggcggccgggcaatgatccgtgccgccgcggacgccgctcccgacgtcttgatcaccgcagtgacggtgctcaccagccttgacgacggggcaatcgcggacatgggattcggggcgaccgtggtggacgccgttcgccggctggcggtgctcgcggtggacgccggggcccgggcggtggtctgctcgccgcaggaggtcgcggcggtacgcgccgaggtgggacccgacgtggtcctgatcacgccgggggtccggccggccggaaccgcactgcaggatcaggcccgggtcggcacgccggaacgggcactggccgacggcgcgaatctgctggtgatcggccggccggtgatccgcgctgccgacccgggtgctgcggccgcctccctcgccgcgcagttgcgccgagccctcgcctga

SEQ ID NO: 156219 - protein, 238 aa, Acidothermus cellulolyticus 11B
MTPDPVRAGRAPIAVALDTPDLDEASRWARLVEPHVSAVKVGLELFTRYGPDAVASVRGGSGLDVFLDLKLHDIPNTVAGAARAVARVRPTYLTVHAAGGRAMIRAAADAAPDVLITAVTVLTSLDDGAIADMGFGATVVDAVRRLAVLAVDAGARAVVCSPQEVAAVRAEVGPDVVLITPGVRPAGTALQDQARVGTPERALADGANLLVIGRPVIRAADPGAAAASLAAQLRRALA

SEQ ID NO: 156220 - DNA, 744 bp, Bacillus thuringiensis str. Al Hakam
  CDS (1)..(744): transl_table=11
atgccaaggaaggagctggaagcaaacatgtcacagtcgttaatcgttgcactagatttcccagggaaacaagatgtagaacaattcttgcgccactttgaaggggaagagttatttgtcaaagttggtatggagttattttacaaagaaggccctgcgattattacgtacttaaaagaaaaaggacataaaatctttctagatttaaaacttcatgatattccgaacacagtaaaaagcgctatgcgtagcctagctagtctagatgtagatatggtaaatgttcatgctgctgggggaagcagtatgatgaaagctgcgattgagggattagaggaaggtaagcaagaaggaaaagagagaccgatttgtattgcagttacacaactaaccagcacttcggaagctatgatgaaaaaagagatcggcattgagaaaacgttagaagaagcggttgctcattatgcaaaactaacgaaagaaagtggacttgatggcgttgtttgctcaacacttgaagttccaaaattacgtgaagtatgcggaaatgaatttgtaacagtaacaccggggattcgtcttgcaagcgatgatgtaaatgaccaggtgcgcgtagcaacaccgaaacgtgcgagggaacttggctcaagctatatcgtagttggacgtagtattacaaaagcagaaaatccgcttgaagcgtataaaacagtaaaacaacagtgggaaggtgtaacagtatga

SEQ ID NO: 156221 - protein, 247 aa, Bacillus thuringiensis str. Al Hakam
MPRKELEANMSQSLIVALDFPGKQDVEQFLRHFEGEELFVKVGMELFYKEGPAIITYLKEKGHKIFLDLKLHDIPNTVKSAMRSLASLDVDMVNVHAAGGSSMMKAAIEGLEEGKQEGKERPICIAVTQLTSTSEAMMKKEIGIEKTLEEAVAHYAKLTKESGLDGVVCSTLEVPKLREVCGNEFVTVTPGIRLASDDVNDQVRVATPKRARELGSSYIVVGRSITKAENPLEAYKTVKQQWEGVTV

SEQ ID NO: 156222 - DNA, 711 bp, Marinobacter aquaeolei VT8
  CDS (1)..(711): transl_table=11
atgcaaaacctgaacgacccgaaaatcatcgtcgcgctcgactttccttcccagaatcccgccttggccctggcagatcagcttgatccggcaaaatgccgcctgaaagtgggcaaggaactgtttacgcgctcaggcccggatctggtaaaagcgctccagagtcgcgggtttgatatcttcctggatctgaagtttcacgatattcccaataccacctcggctgctgtggctgccgctgcagagctgggcgtgtggatggtgaatgtgcatgcctcagggggcgagaagatgatggtagcctgccgagagcgcctggaatcgttcggcaatgatcgcccgctcctgatcgcggttaccgtgttgaccagcatgtctgacgaggaccttgctggtatcggtatagcaagttcggcagaagcccatgtttcccgtctggcaaccctgaccaaaaacagcggcctggacggcgtggtttgctcggctcaggaagccccgcgtctgaaagcggagcagggcagtgacttccaactgatcacgccgggaatccggccactaaccgccgacaaaggcgaccagcaacgcattatgaccccgaccgatgcccttaaggctggatctgactacctggtgattggtcgcccgattacccaggcgccggatcccttggctgcattggaatccattcacgctgaggtcgtagcggtctaa

SEQ ID NO: 156223 - protein, 236 aa, Marinobacter aquaeolei VT8
MQNLNDPKIIVALDFPSQNPALALADQLDPAKCRLKVGKELFTRSGPDLVKALQSRGFDIFLDLKFHDIPNTTSAAVAAAAELGVWMVNVHASGGEKMMVACRERLESFGNDRPLLIAVTVLTSMSDEDLAGIGIASSAEAHVSRLATLTKNSGLDGVVCSAQEAPRLKAEQGSDFQLITPGIRPLTADKGDQQRIMTPTDALKAGSDYLVIGRPITQAPDPLAALESIHAEVVAV

SEQ ID NO: 156224 - DNA, 696 bp, Shewanella sp. W3-18-1
  CDS (1)..(696): transl_table=11
atgaccactaaacctatcctcgtagcacttgattacgataataaaagccacgcgttgcaactcatagatcaactcgatcccaacatgtgccgccttaaaattggcaaagaaatgtttaccctatttgggcctcagctcgttaaggatatccatgatcgtggcttcgatttattcctagatttaaaattccacgacattccaaatacagtcgctaaagccgtggccgctgccgctgatctaggggtatggatgacgaacgtgcatgccagtggtggtttagccatgatggaagcggcaaaaaaagcgttgttgccatacggtgacaaagcgccaatgctgattgctgtgacggtattaacctccatgagtgatgatgatcttaaattaatcggcatcaatgtgcctgcctttgaacatgttcagcgtttagctaaattgacgaaacaggctggtcttgatggtgttgtttgttcagcgcaagaagcaaaggcacttaaaacgttattaggtcaagactttaaactcattacaccaggcattcgtcctgtgggtagcgaggttggcgaccaacatcgggtgatgacaccggctgcggcgatagccgccgggtcagattatttggtggttggccgccccattactaaagccgtcgatccattagcggccttgcaagcgatttatcaatcattggcatag

SEQ ID NO: 156225 - protein, 231 aa, Shewanella sp. W3-18-1
MTTKPILVALDYDNKSHALQLIDQLDPNMCRLKIGKEMFTLFGPQLVKDIHDRGFDLFLDLKFHDIPNTVAKAVAAAADLGVWMTNVHASGGLAMMEAAKKALLPYGDKAPMLIAVTVLTSMSDDDLKLIGINVPAFEHVQRLAKLTKQAGLDGVVCSAQEAKALKTLLGQDFKLITPGIRPVGSEVGDQHRVMTPAAAIAAGSDYLVVGRPITKAVDPLAALQAIYQSLA

SEQ ID NO: 156226 - DNA, 693 bp, Actinobacillus pleuropneumoniae serovar 1 str. 4074
  CDS (1)..(693): transl_table=11
atggataataaaattattgttgctttagactatgaaacagaatacgaagcattgagttttgtagatcaagttgatccgtctctttgtcgtgtgaaagtgggcaaagaaatgtttacaactttaggcacaaattttgttaaacaattacatgaacgtaaatttgatgttttccttgatttaaaatatcacgatattccgaataccgtggctcgtgcggtacgttccgctgcggatttaggcgtgtggatggtagatttacacgcttcgggcggcttaaccatgatggaagaagcgaaaaaaatcttagagccgtatggtaaagatgcgccgttacttattgcagtaacggttttaaccagtatggaagatttagacttattacaaatcggtattaacgcttcgccgatggaacaggtgattcgtttggcgcaccttgcacaacgtgccggtttagacggtgtggtttgttctccgcaagaagtggaagtgcttcgtacgcattgcggcaaagattttaaattagtcacaccgggtattcgtccggagggttctgatgtcggcgatcaacgtcgaattatgacgcctaaacaagcgattgaaaccggatccgattatttggttatcggtcgtccgattacacaggctcaagacccgttatcggtattaaaatcaattaacgcctctattcgttaa

SEQ ID NO: 156227 - protein, 230 aa, Actinobacillus pleuropneumoniae serovar 1 str. 4074
MDNKIIVALDYETEYEALSFVDQVDPSLCRVKVGKEMFTTLGTNFVKQLHERKFDVFLDLKYHDIPNTVARAVRSAADLGVWMVDLHASGGLTMMEEAKKILEPYGKDAPLLIAVTVLTSMEDLDLLQIGINASPMEQVIRLAHLAQRAGLDGVVCSPQEVEVLRTHCGKDFKLVTPGIRPEGSDVGDQRRIMTPKQAIETGSDYLVIGRPITQAQDPLSVLKSINASIR

SEQ ID NO: 156228 - DNA, 693 bp, Haemophilus influenzae R2846
  CDS (1)..(693): transl_table=11
atgacaagtaaaattattgtggcattggattatgagaaagaagcagaggctcttgctttagttgatcaaattgatccaagtttgtgtcgattaaaagtgggtaaagaaatgtttactacacttggtattaattttgtaaaacaattacatcaacgtaattttgatgtttttttggatctgaaatatcacgatattccaaatacggtagcaagagcagttcgttctgctgctgatttaggcgtatggatggtggatctacacgcaagtggtggcttgcgtatgatggaagaagcgaagaaaattcttgaaccctatgggaaagatgcaccattgcttattgctgtgacggtattaaccagtatggaagacttggatttattacaaattgggattaatgcatcgccaatggaacaagttttacgcttagctcatttaacccaacgggcgggtttagatggtgtagtctgttcccctcaagaagttgaaattttacgtaacgcttgtggagaagactttaaattagtgaccccagggattcgtccaataggaactgattttggcgatcaaagacgtgtaatgacgcctactgcagcaattcgtgcaggttcagattatttagttattggacgcccaataactcaagcggataatcctgcggaggttctccgttctattaatgtatctattgggtaa

SEQ ID NO: 156229 - protein, 230 aa, Haemophilus influenzae R2846
MTSKIIVALDYEKEAEALALVDQIDPSLCRLKVGKEMFTTLGINFVKQLHQRNFDVFLDLKYHDIPNTVARAVRSAADLGVWMVDLHASGGLRMMEEAKKILEPYGKDAPLLIAVTVLTSMEDLDLLQIGINASPMEQVLRLAHLTQRAGLDGVVCSPQEVEILRNACGEDFKLVTPGIRPIGTDFGDQRRVMTPTAAIRAGSDYLVIGRPITQADNPAEVLRSINVSIG

SEQ ID NO: 156230 - DNA, 732 bp, Azotobacter vinelandii
  CDS (1)..(732): transl_table=11
atgcccgccacagcgattttcccggagcccgtccccatgtcctgccagaccccgatcatcgtcgccctcgacttccccggccgcgaggcggccctggccctcgccgcccggctggaccccgcgcggtgccgggtcaaggtcggcaaggagctgttcacccgctgcggcccggatatcgtcgagacgctgcagcagcagggcttcgaggtgttcctcgacctgaaattccacgacatcccgaacaccacggcgatggcggtgaaggccgccgccgagctgggcgtgtggatggtcaacgtgcactgctccggcggtctgcgcatgctgagcgcctgtcgcgagaccctggacggcattcatggccgccggccgttgctgatcggggtgacggtgctgaccagcatggagcgcgaggacctggccggcatcggcctggatgtcgagccgcagcagcaggtcctgcgcctggccgccctggccgagcaggccgggctggacggactggtctgctcggcccaggaggcgccggcgctgaagaccgcccggccgcggctgaaactggtgacccctggcatccgtccggccggcagcgccccggacgaccagcggcgcatcctcactccgcgccaggcgctggaggccggttccgactacctggtcatcggccggccgatcagccaggccgccgacccggcccaggcactggcggctctggtcgccgaactggactga

SEQ ID NO: 156231 - protein, 243 aa, Azotobacter vinelandii
MPATAIFPEPVPMSCQTPIIVALDFPGREAALALAARLDPARCRVKVGKELFTRCGPDIVETLQQQGFEVFLDLKFHDIPNTTAMAVKAAAELGVWMVNVHCSGGLRMLSACRETLDGIHGRRPLLIGVTVLTSMEREDLAGIGLDVEPQQQVLRLAALAEQAGLDGLVCSAQEAPALKTARPRLKLVTPGIRPAGSAPDDQRRILTPRQALEAGSDYLVIGRPISQAADPAQALAALVAELD

SEQ ID NO: 156232 - DNA, 699 bp, Crocosphaera watsonii WH 8501
  CDS (1)..(699): transl_table=11
atgtctgttgctgatcagatcattgttcctttagatgttcctacagaagaagcagcgatcgccttattggatcgtttacctcaagttagcttttggaaagtggggttagaattattcgtggccacggggccgactattcttaaacacctcaaagagcggaaaaaaaagatttttcttgacttgaaatttcatgatattcctaacacggtaatgggagcttgccgtagtgcctctagatacgaggtagacttattaacccttcatgctactgctggcaaaaatgccctcaaagcagcgagagaagctattgcccacagtgcctcaccccctcaattattagccataaccttgctcactagcctcaatgcacgggacctggcctttgatctgaaaattcctttagaactgccagaatacgccctacagatggctttattagccaaagattgcggcataaatggggctgtgtgttctcctcaggaagtagctcaactgagagcagtttgtgggaaagattttgtcttagtttgtcctggggttcgtcctagttggggacaaacaggggatcagcaaagggtaatgacacctaaacaggccctggatgcaggggcaaattatttagtcattggtagacctattacaatgtcagatgatcctgttatggcttggaaccgtattgttgatgaagttagtagctaa

SEQ ID NO: 156233 - protein, 232 aa, Crocosphaera watsonii WH 8501
MSVADQIIVPLDVPTEEAAIALLDRLPQVSFWKVGLELFVATGPTILKHLKERKKKIFLDLKFHDIPNTVMGACRSASRYEVDLLTLHATAGKNALKAAREAIAHSASPPQLLAITLLTSLNARDLAFDLKIPLELPEYALQMALLAKDCGINGAVCSPQEVAQLRAVCGKDFVLVCPGVRPSWGQTGDQQRVMTPKQALDAGANYLVIGRPITMSDDPVMAWNRIVDEVSS

SEQ ID NO: 156234 - DNA, 696 bp, Vibrio sp. MED222
  CDS (1)..(696): transl_table=11
atgaacgaccaaaaaatcattgtagcattggattatgataaccaagcggatgcgttagcctttgtcgatcgtattgacccagcatcttgccgcctaaaagttggcaaagagatgtttactctgtttggccctgaatttgttcgtgaattacataaacgtggtttctctgtgtttttggaccttaagttccacgatatcccgaacacatgttcaaaagcggtacgtgctgccgctgagatgggcgtgtggatggtgaacgtacacgcgagcggtggcgagcgtatgatgacggcttctcgtgaaattttggaaccatatggtaaagatcgtccattgttaatcggtgtgacggtactaaccagtatggagcaatctgacttagcgggtatcggtctggatctagagccacagcaacaagtgatgcgcttagcgtctttgactaaaaactcaggcctagacggtgttgtatgttctgcacaagaggcttctttgctcaaaggtgcacttggtcaggagttcaaactagtaactccaggtattcgtcctgtaggcgctgatgttggtgaccagaagcgtatcatgacgccttctaaggcgattgagtcaggttctgactatcttgttatcggtcgtccaattactcaagcagcagaccctgcatcagtacttgctgaaatcaacggcacgctagcttaa

SEQ ID NO: 156235 - protein, 231 aa, Vibrio sp. MED222
MNDQKIIVALDYDNQADALAFVDRIDPASCRLKVGKEMFTLFGPEFVRELHKRGFSVFLDLKFHDIPNTCSKAVRAAAEMGVWMVNVHASGGERMMTASREILEPYGKDRPLLIGVTVLTSMEQSDLAGIGLDLEPQQQVMRLASLTKNSGLDGVVCSAQEASLLKGALGQEFKLVTPGIRPVGADVGDQKRIMTPSKAIESGSDYLVIGRPITQAADPASVLAEINGTLA

SEQ ID NO: 156236 - DNA, 696 bp, Congregibacter litoralis KT71
  CDS (1)..(696): transl_table=11
atgagtcgtgttgagtctccggtgatcgtagccctggactatcctgagatggcgccagccttggaactggcatctgctctggacccgacggcctgtcgcctcaaggtgggcaaggagttgtttacggctgagggccccgggcttgtagagcgtttgcagtccatgggttttgaggtgttcctggatctcaagtttcacgatatccccaataccgttgccggcgctctgcgcagcgccgcggacctgggggtttggatggtcaacgtgcatgtcagcggcggtcgtcgcatgctggaggcgtctgtggaggccattgccggcggcgctaagccaccgctactcatcggcgtcaccgtgctcaccagcatggatgccggtgattttgatgagctgggatacgggaactccctcgaggagcaggtactgcgcctcgcaacgctggcgaaggattgcggcttgcagggggttgtctgctcggcacgggaagccgcggcgctgcgagcaaggctcggtacgtcctttgcactggtgacgccgggcattcgtcccgcgggtgctgtcgcggacgaccagcggaggatcctcaccccggcccaagcgatagcggccggtgcaagctatctggtagtggggagacccatcacccaggccgacgatcctgccgctgctctcggggcaatcaacgcctccctgtag

SEQ ID NO: 156237 - protein, 231 aa, Congregibacter litoralis KT71
MSRVESPVIVALDYPEMAPALELASALDPTACRLKVGKELFTAEGPGLVERLQSMGFEVFLDLKFHDIPNTVAGALRSAADLGVWMVNVHVSGGRRMLEASVEAIAGGAKPPLLIGVTVLTSMDAGDFDELGYGNSLEEQVLRLATLAKDCGLQGVVCSAREAAALRARLGTSFALVTPGIRPAGAVADDQRRILTPAQAIAAGASYLVVGRPITQADDPAAALGAINASL

SEQ ID NO: 156238 - DNA, 702 bp, Pseudoalteromonas tunicata D2
  CDS (1)..(702): transl_table=11
atgtcacacttaaatgatccaaaagtattaatagcgcttgattttgatgatgaagaagctgcgttgaacttcgtgaatcaattatcacctcaagattgtcgcttaaaagttggcaaagaaatgttcacctatttcggccctgagtttgttaaaaagctgatagctaaagattttgatgtttttttagatttaaaattccacgatattccaaatactgttgctaaagcggtagtcgctgctgctaagatgggtgtctggatggttaatgttcacgcaagtggcgggcctgaaatgatgataaaggcaaaagaagcattactgccatttggtgaaaaagcaccattacttattgccgtaacggttttaacgagtatggatgctgatgaattatctcgattaggtgtaactaaaagtcctcaagagcaagttttatatttggcaacacttgctaaacaatcgggattagacggtgtagtttgctcagcacaagaagcgagtagtttaaaagataaatttggaaagaatttcaaattaataaccccagggatcagaccgcaaggaagtgaaattggtgatcaaaaaagaataatgacacctaaattagcacttgaaaatggaagtgactaccttgtgataggtcggccaataactcaagcagaagatccagttgctgcactggctgcaataaatttatctctttaa

SEQ ID NO: 156239 - protein, 233 aa, Pseudoalteromonas tunicata D2
MSHLNDPKVLIALDFDDEEAALNFVNQLSPQDCRLKVGKEMFTYFGPEFVKKLIAKDFDVFLDLKFHDIPNTVAKAVVAAAKMGVWMVNVHASGGPEMMIKAKEALLPFGEKAPLLIAVTVLTSMDADELSRLGVTKSPQEQVLYLATLAKQSGLDGVVCSAQEASSLKDKFGKNFKLITPGIRPQGSEIGDQKRIMTPKLALENGSDYLVIGRPITQAEDPVAALAAINLSL

SEQ ID NO: 156240 - DNA, 717 bp, Bacillus sp. NRRL B-14911
  CDS (1)..(717): transl_table=11
atgaagaatccgcttatcatcgcgcttgattttgctgaaaaggaagaagtcttatccttcctcgggaaatttccggaagaaaaattatttgtcaaagtgggcatggagcttttttaccaggagggacctgacatggtccgggaactgaaggcggccgggcatgaagtattcctggatttaaagctccatgatattcctaatacagtcggcagtgccatgcgaaggattgccggtcttggatgcgatctggtgaatgtccatgcagccggcggcagcgaaatgatgaaagccgcccttgaagggctggatgaagggacagcagccggaaaaaaaaggcctctgtgcattgcggtgacacagctcaccagcacatcagaggaacagatgcgggcagagcagctgatccctgttgcactgaatgattctgttattcattatgcagggcttgccagacagtcagagcttgatggcgtcgtctgctccccgcatgaagcaaagctgctgaacagccgttttggggaaggattcctgacagtgacgccagggattcgtctggcagaagaggcggcaggtgatcaaaagaggatcagcacaccgggatttgcaaggcaggaaggagtctcggccatagtagtaggccgttccatcacaaaagcagctgatccgtatgaagcttatctgtcatttaaaaatcaatgggagggcgttttgtcatga

SEQ ID NO: 156241 - protein, 238 aa, Bacillus sp. NRRL B-14911
MKNPLIIALDFAEKEEVLSFLGKFPEEKLFVKVGMELFYQEGPDMVRELKAAGHEVFLDLKLHDIPNTVGSAMRRIAGLGCDLVNVHAAGGSEMMKAALEGLDEGTAAGKKRPLCIAVTQLTSTSEEQMRAEQLIPVALNDSVIHYAGLARQSELDGVVCSPHEAKLLNSRFGEGFLTVTPGIRLAEEAAGDQKRISTPGFARQEGVSAIVVGRSITKAADPYEAYLSFKNQWEGVLS

SEQ ID NO: 156242 - DNA, 717 bp, Psychromonas sp. CNPT3
  CDS (1)..(717): transl_table=11
atgaaaaacgaaagtatggttaaaaacgatcccaaagtattggtcgcattagattatagtaataaacaagaggcgctcaattttattcgccgtttagatccttctgtttgtcgtttaaaaataggtaaagaaatgtttacccattttggaccggattttgttaaaaacttagtacagcaaaatttcgatgtttttttagacttaaaatttcatgatattcctaacacagtggccaaagcggtaaaagcggctgcagatcttggcgtgtggatggtgaatgtgcatgccagtggtggccggcgcatgatgcaagctgctaaaacggcgcttttaccttatgcagataaagcgccacttttaattggcgtcactgtgcttaccagtatggacgaaagtgatttgttagagcttgggatcactcgatcactgagcgaacaagttaaacatttggctaaattaacacaattagcaggccttgatggtgtggtttgctctgcccatgaagccgcgcaattgaaggttttatgtggcgcgaagtttaaactaattacgcctggcattaggcctcagggctgtgacgctggagatcaaagacgcattaaaacacctcgagaggcgatggatttaggctctgattatttggttattggcagaccaataacgcaggcgactaatccgatgcaagtgttaactgaaattaatgcttctttactgtag

SEQ ID NO: 156243 - protein, 238 aa, Psychromonas sp. CNPT3
MKNESMVKNDPKVLVALDYSNKQEALNFIRRLDPSVCRLKIGKEMFTHFGPDFVKNLVQQNFDVFLDLKFHDIPNTVAKAVKAAADLGVWMVNVHASGGRRMMQAAKTALLPYADKAPLLIGVTVLTSMDESDLLELGITRSLSEQVKHLAKLTQLAGLDGVVCSAHEAAQLKVLCGAKFKLITPGIRPQGCDAGDQRRIKTPREAMDLGSDYLVIGRPITQATNPMQVLTEINASLL

SEQ ID NO: 156244 - DNA, 702 bp, Vibrio alginolyticus 12G01
  CDS (1)..(702): transl_table=11
atgatcgaccaaaaagttattgtcgcactggattatgataaccaagcagatgcacttgcgtttgtagatagaattgatcctgcgtcatgccgactaaaagttggcaaggagatgtttacgctatttggtcctgattttgtacgtgaactccataaacgtggtttctcggtattcctagatttaaaatttcacgatattccaaacacctgttcgaaagcagttcgcgctgcggctgaaatgggtgtatggatggtgaacgtacacgcgagcggtggtgagcgtatgatgacggcatcacgtgaaattcttgagccatatggtaaagatcgtccacttcttatcggtgtaacggtactaaccagtatggaacaaagtgatttagctggtattggtttgaatgttgcgcctcaggagcaagtgattcgtctagcaaccttgaccaaaaacgcaggcttagatggtgtggtatgttcagcgcaagagtcctcattactgaagagcgaactaggccaagaatttaagttagtgacccctggtattcgacctgctggctcagaacaaggtgaccaacgccgtatcatgacgccagtagacgctatccaatcaggttcagattatcttgtgattggtcgccctatcactcaagcgtcaaatcctgcagaagtgctgaagtcgatcaatgagagcttatctaacatgtaa

SEQ ID NO: 156245 - protein, 233 aa, Vibrio alginolyticus 12G01
MIDQKVIVALDYDNQADALAFVDRIDPASCRLKVGKEMFTLFGPDFVRELHKRGFSVFLDLKFHDIPNTCSKAVRAAAEMGVWMVNVHASGGERMMTASREILEPYGKDRPLLIGVTVLTSMEQSDLAGIGLNVAPQEQVIRLATLTKNAGLDGVVCSAQESSLLKSELGQEFKLVTPGIRPAGSEQGDQRRIMTPVDAIQSGSDYLVIGRPITQASNPAEVLKSINESLSNM

SEQ ID NO: 156246 - DNA, 699 bp, Oceanobacter sp. RED65
  CDS (1)..(699): transl_table=11
atgagttttaaacccatcttagtcgctctcgattatgaccgtgcagagccagccctcgacctagtgagtaagttagatgcttcgcaatgccgtcttaagatcggtaaagaattatttacctctgaaggccctgctttggttgagaaagtacagagtatggggtttgacgtatttttggatctaaaatttcatgacattcccaatacgtgttcaaaagccgttaaagcagctgcagagttgggggtgtggatggtcaatgtgcatgccagtggtggtcgacgaatgatggaagcgtctgcagatgccctagccaactataagaataaacctaagctgattgcggtaactgtgctaacaagcatggaacgtgttgacttaagtgacattgggttagatgttgaccctcaggagcatgttttgcgtttggccaagcttacacaatcatcagggcttgatggtgtagtgtgttccgcacaagaagctcagatgcttaagcaaagtttgggacaagattttcaactagtgacaccaggtattagacctagctttgctcaggcaggtgatcagcgacgagttatgacgccttctgatgctttaaaagctggggttgactacatggtgattgggcgtccaattactcaggcaaaagacccattgcaagcgctgaatttgattcaaaacgaaattactggcttataa

SEQ ID NO: 156247 - protein, 232 aa, Oceanobacter sp. RED65
MSFKPILVALDYDRAEPALDLVSKLDASQCRLKIGKELFTSEGPALVEKVQSMGFDVFLDLKFHDIPNTCSKAVKAAAELGVWMVNVHASGGRRMMEASADALANYKNKPKLIAVTVLTSMERVDLSDIGLDVDPQEHVLRLAKLTQSSGLDGVVCSAQEAQMLKQSLGQDFQLVTPGIRPSFAQAGDQRRVMTPSDALKAGVDYMVIGRPITQAKDPLQALNLIQNEITGL

SEQ ID NO: 156248 - DNA, 717 bp, Desulfuromonas acetoxidans DSM 684
  CDS (1)..(717): transl_table=11
atgaaagatcggttgatttttgcgctggatgtcgacagttatgatgaagctcggcagtgggtacgcattctcgctgatgaggtagggatgttcaaggtcggcaagcagttgtttacccggtgtggtccccagattgtggatatgattcgccaggccgggggcggcgtttttcttgaccttaaatatcatgatatccccaatactgttgccaaggccggtattgaagcggcacgtatgggtgtgcagatgttcaatgttcatgcgctgggcggcggcaagatgatgcggacgatggttgatgaagttcgggaggccgccgtcaaggagggttttcctgtgccgatcacgttggcggtaaccattctcacctcgtcgtctgaagaagatctgcgtcaggtggggatcgaccttcctgtgacgcagatggtgcctcggcttgcaacgttagccagggaaagtggactgcatggtgtggtggcctcggctcaagaattgccgctgattcgtcaggcctgcggtggtgactttgtcgttgtgacccctggtgtgcgcccggcaacggcggcacgtgatgatcaacaacgggtgatgacaccgggggaagcgattgccgccggctcagattatctggttgtcggtcggccgatttccaaggcagatgacccggttctagcggcacgctctattgttgcggagatgaccgaggctggcgcgtga

SEQ ID NO: 156249 - protein, 238 aa, Desulfuromonas acetoxidans DSM 684
MKDRLIFALDVDSYDEARQWVRILADEVGMFKVGKQLFTRCGPQIVDMIRQAGGGVFLDLKYHDIPNTVAKAGIEAARMGVQMFNVHALGGGKMMRTMVDEVREAAVKEGFPVPITLAVTILTSSSEEDLRQVGIDLPVTQMVPRLATLARESGLHGVVASAQELPLIRQACGGDFVVVTPGVRPATAARDDQQRVMTPGEAIAAGSDYLVVGRPISKADDPVLAARSIVAEMTEAGA

SEQ ID NO: 156250 - DNA, 729 bp, Desulfitobacterium hafniense DCB-2
  CDS (1)..(729): transl_table=11
atggagctggaaagaacagtgtcggagaacaataaaaaggtcatggtggctatggatgtgaatagccgggagaaggctttagccctggctgaccaacttcaggggagcggctgctggcttaaagtggggatggagctctataatgctgcaggtgccggcattatccgagaactgaaggacaaagggttccccatcttcctggacctgaagcttcatgatatccccaatacggtggaaagtgcggtacgggttctggccggatatggcgccgatgtgctcactattcactgcagcggcggtcatgatatgatggcccgggcggtccaggctacccatgaagtgaaaaagcaaaagaatgctgaggagcggatgaagattatcggcatcacggtactgaccagccttgatgaagagaggctgcagcaggatctgggagtgggcagaaccctgccggagcaggtggttgccctggccgaactgggtcaaaaggcaggtattgacggggtggtggcctcggctcaagaaagcgccatcctccgccggcatgtaggaccggattttgtggtcattacgccggggattcgccccaaaggcagtgaaacccatgatcaagcccgtacacttactcccaaagaagccctggaagcggggagctcttatctggtggtaggcagacccattacccaggcggccaatccaaggcaggctttggagcagctttgggattaa

SEQ ID NO: 156251 - protein, 242 aa, Desulfitobacterium hafniense DCB-2
MELERTVSENNKKVMVAMDVNSREKALALADQLQGSGCWLKVGMELYNAAGAGIIRELKDKGFPIFLDLKLHDIPNTVESAVRVLAGYGADVLTIHCSGGHDMMARAVQATHEVKKQKNAEERMKIIGITVLTSLDEERLQQDLGVGRTLPEQVVALAELGQKAGIDGVVASAQESAILRRHVGPDFVVITPGIRPKGSETHDQARTLTPKEALEAGSSYLVVGRPITQAANPRQALEQLWD

SEQ ID NO: 156252 - DNA, 663 bp, Mariprofundus ferrooxydans PV-1
  CDS (1)..(663): transl_table=11
atggtggcgctggatgtgccggacgcgggtcaggctctggcactgcgcgatcagctgggggatacggtcggctggttcaagatcggtttgcgcctgtttgtggctgaaggcccgcaactggtggcggccattggcgcgacgcacaaggtctttctcgaccttaaatttcacgatattcccaataccgtggcagaggcgattgagagtgccggaaggctcggtgtggatatggtgaacgtgcatgccggcggcggagtcgagatgctggctgctgcagccaaagcggctgaggcatttccggatatgttgttgattgccgttaccgtgctgaccagcgattccatgcccaaagagcaggctgcggttgtcgcactggagcgggcgcagatggccagggatgcagggctggatggcgttgtgtgcagcgtgcatgaggcggctgcaatcaagcatgcctgcggtccgcactttattaccgtcacaccgggcatacgctggggcgatcaggatctgcaggatcagaagcgggttgctgatcctgcaggtgcgatccggggcggctccgattatctggtggtcgggcgacccattatcaaggcggccgatccgcgtgctgccgctttggaagcgcagtcgatgatgcactcggcgctctgtctgtaa

SEQ ID NO: 156253 - protein, 220 aa, Mariprofundus ferrooxydans PV-1
MVALDVPDAGQALALRDQLGDTVGWFKIGLRLFVAEGPQLVAAIGATHKVFLDLKFHDIPNTVAEAIESAGRLGVDMVNVHAGGGVEMLAAAAKAAEAFPDMLLIAVTVLTSDSMPKEQAAVVALERAQMARDAGLDGVVCSVHEAAAIKHACGPHFITVTPGIRWGDQDLQDQKRVADPAGAIRGGSDYLVVGRPIIKAADPRAAALEAQSMMHSALCL

SEQ ID NO: 156254 - DNA, 693 bp, Methylophilales bacterium HTCC2181
  CDS (1)..(693): transl_table=11
atgatcaataatattaagatttttgtagctctcgactactcagatgaaacatcagcatgcaggctaataaatcttctatcgccctcggactgtggggtgaaaattggcaaagaattgtttactgcagctggtccaaaaatagttgagtatgcccaaaaaaaaggctttgaggtttttttagatctaaaatatcacgatataccaaacacggtaaaaaaagcttgtcaaagtgctgcaaggcttggagtttatatggttaatgttcatgctctcggtggctctgagatgatgattgccgctaaggaaggcttaactcaatcaaaagccaaaccgttgcttataggtgtaactttgctaactagtcatgaccaaaaaaatcttcatgaaatgggcgtgacaaaaaatttagaagatgagattgcgcatcttgcaacgaatgtagcgaaatgtgggttagatggagttgtttgctcagcaaacgatataaaattccttaagccctcgctacccaaaaactttcattttgtaactccaggtattcgtccaattgattcatcaaatgatgatcaaaagagaattacgacacctgaggatgcattagcatctggctccacaatgttagtaattggaaggcctatcacacattcctcgaatccatacgaggccttgaaggccatcagaagaacattatag

SEQ ID NO: 156255 - protein, 230 aa, Methylophilales bacterium HTCC2181
MINNIKIFVALDYSDETSACRLINLLSPSDCGVKIGKELFTAAGPKIVEYAQKKGFEVFLDLKYHDIPNTVKKACQSAARLGVYMVNVHALGGSEMMIAAKEGLTQSKAKPLLIGVTLLTSHDQKNLHEMGVTKNLEDEIAHLATNVAKCGLDGVVCSANDIKFLKPSLPKNFHFVTPGIRPIDSSNDDQKRITTPEDALASGSTMLVIGRPITHSSNPYEALKAIRRTL

SEQ ID NO: 156256 - DNA, 705 bp, Alteromonadales bacterium TW-7
  CDS (1)..(705): transl_table=11
atgtctttcgaaaattcaaaaaaagtgcttatcgctttagactacgacgatcaagaaacagcattagcatttgtaaaacagctttcgcccgatacttgtcgattaaaagtaggcaaagaaatgtttacttactttggccctgaatttgtaaaagagttaattgaacttggttttgatgtatttttagatttaaagtttcatgatattcctaatacagttgcaaaggcagttacagctgctgcaaaaatgggcgtttggatggtaaatgttcatgcgtcaggcggttatgaaatgatgcacaaagcaaaacttgctttagaagaatttggagatagagcaccaattcttattgctgtaactgtgttaacaagtatggatgaaccagaattaaaacgcttaggtataaacaaatcaccacaggagcaggtaatataccttgcaaaactagctaaggaagcaggccttgatggtgttgtttgttctgctcaagaagcgaatgttttaaaggctgaacttggtgagcattttaaattagttaccccaggtattcgccctgaaggcagtgaagcaggcgatcaaaaaagaataatgactccaaaacaagcaattgaagctggcagtgattatctagttgtaggcagaccgattactaaagcagcaaatccagtaaaagtactgcaagatgttaatgaatctataaaataa

SEQ ID NO: 156257 - protein, 234 aa, Alteromonadales bacterium TW-7
MSFENSKKVLIALDYDDQETALAFVKQLSPDTCRLKVGKEMFTYFGPEFVKELIELGFDVFLDLKFHDIPNTVAKAVTAAAKMGVWMVNVHASGGYEMMHKAKLALEEFGDRAPILIAVTVLTSMDEPELKRLGINKSPQEQVIYLAKLAKEAGLDGVVCSAQEANVLKAELGEHFKLVTPGIRPEGSEAGDQKRIMTPKQAIEAGSDYLVVGRPITKAANPVKVLQDVNESIK

SEQ ID NO: 156258 - DNA, 708 bp, Lyngbya sp. PCC 8106
  CDS (1)..(708): transl_table=11
atgaatacagataaaattattgttcctctcgatgtttcaacgattacagaagcactcgctttagttgaccaattgccccaagtttctttctggaaagtcggtctagaactctttgtgagtaacgggccagaaatattaacccaactcaaacaacgacaaaaacgaatatttctcgacctgaaatttcacgatattccgaataccgttgcaggtgcttgtcgggcggcttctcaatacggcgttgatttaattaccattcacgcaaccgccggaaaagtggcgttaaaagccgctcaaaatgccctagaagaaggggcaaaagcagctaataaaccgattccaaatttaattgcaattacattattaacgagtctcaattcccgtgaattagcctttgatttaaaaatccctttagagttgccagaatacgccctacacatggcattactcgcccaagaaagtgggttggcgggggcggtttgttcaccccaagaagttgaacagttacggcgaacctgtgggaatgattttctactcgtttgtccgggtgtacgtccgacttgggcggaaaaaggcgatcaacagcgttcatttaccccgtctcaggcgatgaaagcgggtgctgattacctggtcatcggacgacccataaccgcctcagaggaccccgtaggtgctttagaacgcatttttgaggagatatcttaa

SEQ ID NO: 156259 - protein, 235 aa, Lyngbya sp. PCC 8106
MNTDKIIVPLDVSTITEALALVDQLPQVSFWKVGLELFVSNGPEILTQLKQRQKRIFLDLKFHDIPNTVAGACRAASQYGVDLITIHATAGKVALKAAQNALEEGAKAANKPIPNLIAITLLTSLNSRELAFDLKIPLELPEYALHMALLAQESGLAGAVCSPQEVEQLRRTCGNDFLLVCPGVRPTWAEKGDQQRSFTPSQAMKAGADYLVIGRPITASEDPVGALERIFEEIS

SEQ ID NO: 156260 - DNA, 729 bp, Thermosinus carboxydivorans Nor1
  CDS (1)..(729): transl_table=11
atgcaggctgataaacggttaattgtggctctggatgttaacgatatgaataaggtctgtgaaattgtagaggcgctgggggaatgggttgctttttataaagtgggaatggagctgtactatagcgtcggtgttacagtaattaattatttaaaaagtatggggaaagaagtattccttgatttaaaactacatgatatacccaatacagtggcgcatgctgcaggaatactaacgggtcttggcgtctccatgctaacgctgcatactggtggaggaccggccatgatgcgggctgctgctatggcagtggccgaaaaagcggctgaattaggtataccgaggcctaaattaatcggcgtgacggtactgacaagcataaatgaaaatgagtggacggctttggggcataaaacacctgtagctgatcaagtcgttcatctcgccaaattagcacaaggggcaggtatggatggagtcgtggcttcgccgcgggaagcggcgcttatccgtcgtgcctgtggtgataatttgcttgttgttacgccgggtattcgaccggttggcgctaatcaagacgatcaaaaccgcatagctacaccggcggcagctttggcagcgggggctactcatctagtaatcggtcgtcctattacggcggcgccgaacattgctgaagcagcacgaaaggtcatacgggaaatggctgaaagcggcttgaaattttaa

SEQ ID NO: 156261 - protein, 242 aa, Thermosinus carboxydivorans Nor1
MQADKRLIVALDVNDMNKVCEIVEALGEWVAFYKVGMELYYSVGVTVINYLKSMGKEVFLDLKLHDIPNTVAHAAGILTGLGVSMLTLHTGGGPAMMRAAAMAVAEKAAELGIPRPKLIGVTVLTSINENEWTALGHKTPVADQVVHLAKLAQGAGMDGVVASPREAALIRRACGDNLLVVTPGIRPVGANQDDQNRIATPAAALAAGATHLVIGRPITAAPNIAEAARKVIREMAESGLKF

SEQ ID NO: 156262 - DNA, 696 bp, Shewanella putrefaciens 200
  CDS (1)..(696): transl_table=11
atgaccactaaacctatcctcgtagcacttgattacgataataaaagccacgcgttggaactcatagatcaactcgatcccaacatgtgccgccttaaaattggcaaagaaatgtttaccctatttgggcctcagctcgttaaggatatccatgatcgtggcttcgatttattcctagatttaaaattccacgacattccaaatacagtcgctaaagccgtggccgctgccgctgatctaggggtatggatgacgaacgtgcatgccagtggtggtttagccatgatggaagcggcaaaaaaagcgttgttgccatacggtgacaaagcgccaatgctgattgctgtgacggtattaacctccatgagtgatgatgatcttaaattaatcggcatcaatgtgcctgcctttgaacatgttcagcgtttagctaaattgacgaaacaggttggtcttgatggtgttgtttgttcagcgcaagaagcaaaggcacttaaaacgttattaggtcaagactttaaactcattacaccaggcattcgtcctgtgggtagcgaggttggcgaccaacatcgggtgatgacaccggctgcggcgatagccgccgggtcagattatttggtggttggccgccccattactaaagccgtcgatccattagcggccttgcaagcgatttatcaatcattggcatag

SEQ ID NO: 156263 - protein, 231 aa, Shewanella putrefaciens 200
MTTKPILVALDYDNKSHALELIDQLDPNMCRLKIGKEMFTLFGPQLVKDIHDRGFDLFLDLKFHDIPNTVAKAVAAAADLGVWMTNVHASGGLAMMEAAKKALLPYGDKAPMLIAVTVLTSMSDDDLKLIGINVPAFEHVQRLAKLTKQVGLDGVVCSAQEAKALKTLLGQDFKLITPGIRPVGSEVGDQHRVMTPAAAIAAGSDYLVVGRPITKAVDPLAALQAIYQSLA

SEQ ID NO: 156264 - DNA, 711 bp, Marinobacter sp. ELB17
  CDS (1)..(711): transl_table=11
atgcaaggcacccaagcatcccccatcatcgttgccctcgatttcccctatgatcaacccgcactagccttggtcgatcagctagatccagaaaaatgccgcctgaaagtgggcaaagagttgttcaccagcagtggcccagctttagttcgcgagcttcagcagcgtggcttcgaggtgtttctggatttaaaatttcatgacattcccaacaccgccgcgggtgcggttgccgctgcggcggacttgggtgtgtggatggtgaacgtgcacgcctccggtggcgaaaaaatgatgatcgcctgccgcgaacgcctggaacgcttcggcgccgacaagccactgcttattgcggtcaccgtactgaccagcatgacggaacgcgacctcagcggcatcggcatcaatgtctctgccgaagagcatgtatcgcgcctggccaccctgaccaaaaactgcggcctggacggcgtagtctgctcagcgcaagaagcccccaagctaaaagcagagcagggcgcagcctttcagttaatcacccccggcatccgcccggccagcgccgacaaaggcgaccagcaacgcatcatgacccccgcagcagccctaaaagccggctccgactacctggtcatcggccgccccatcacccaggctgctgatcctctggctgctttggaagcgatctatgctgaggtggcgggcctgtag

SEQ ID NO: 156265 - protein, 236 aa, Marinobacter sp. ELB17
MQGTQASPIIVALDFPYDQPALALVDQLDPEKCRLKVGKELFTSSGPALVRELQQRGFEVFLDLKFHDIPNTAAGAVAAAADLGVWMVNVHASGGEKMMIACRERLERFGADKPLLIAVTVLTSMTERDLSGIGINVSAEEHVSRLATLTKNCGLDGVVCSAQEAPKLKAEQGAAFQLITPGIRPASADKGDQQRIMTPAAALKAGSDYLVIGRPITQAADPLAALEAIYAEVAGL

SEQ ID NO: 156266 - DNA, 693 bp, Haemophilus influenzae R3021
  CDS (1)..(693): transl_table=11
atgacaagtaaaattattgtggcattggatttcgagaaagaagcagaggctcttgctttagttgatcaaattgatccaagtttgtgtcgattaaaagtgggtaaagaaatgtttactatacttggtattaattttgtaaaacaattacatcaacgtaattttgatgtttttttggatctgaaatatcacgatattccaaatacggtagcaagagcagttcgttctgctgctgatttaggcgtatggatggtggatttacacgcaagtggtggcttgcgtatgatggaagacgcgaagaaaattcttgagccttatgggaaagatgcgccattgcttattgctgtgacggtattaaccagtatggaagacttggatttattacaaattgggattaatgcatcgccaatggaacaagttttacgcttagctcatttaacccaacgggcgggtttagatggtgtagtctgttcccctcaagaagttgaaattttacgtaacgcttgtggagaagactttaaattagtgaccccagggattcgtccaataggaactgattttggcgatcaaagacgtgtaatgacgcctactgcagcaattcgtgcaggttcagattatttagttattggacgcccaataactcaagcggataatcctgcggaggttctccgttctattaatgtatctattgggtaa

SEQ ID NO: 156267 - protein, 230 aa, Haemophilus influenzae R3021
MTSKIIVALDFEKEAEALALVDQIDPSLCRLKVGKEMFTILGINFVKQLHQRNFDVFLDLKYHDIPNTVARAVRSAADLGVWMVDLHASGGLRMMEDAKKILEPYGKDAPLLIAVTVLTSMEDLDLLQIGINASPMEQVLRLAHLTQRAGLDGVVCSPQEVEILRNACGEDFKLVTPGIRPIGTDFGDQRRVMTPTAAIRAGSDYLVIGRPITQADNPAEVLRSINVSIG

SEQ ID NO: 156268 - DNA, 696 bp, Vibrionales bacterium SWAT-3
  CDS (1)..(696): transl_table=11
atgaacgaccaaaaaatcattgtagctttggattatgacaaccaagcggatgcgttagcctttgttgaccgtattgatccagcatcttgccgtctaaaagtggggaaagagatgtttaccctttttggtcctgaatttgttcgtgaattacataaacgtggtttctcagtattcttggatcttaaattccacgatattccgaacacatgttcaaaagcagtacgtgcagccgctgaactaggcgtatggatggtgaacgtgcacgcaagtggtggcgaacgcatgatgacggcttcacgcgaaatcttggaaccttatggtaaagatcgcccattactgattggtgtaacagtactgactagcatggagcaatcggacttagctggtatcggtttagatcttgagccacaacagcaagtaatgcgtttggcttctttaactaaaaactcaggtcttgacggtgttgtgtgttcagcacaagaggcttctttattgaaaggtgctcttggccaggagttcaagttggtgactccaggcattcgccctgtaggtgccgatgttggtgaccaaaagcgtatcatgacgccttctaaagcgattgaatctggttctgactacttggttattggtcgcccaattactcaggctgcagaccctgcagctgtgcttgctgaaatcaacggtacactagcttaa

SEQ ID NO: 156269 - protein, 231 aa, Vibrionales bacterium SWAT-3
MNDQKIIVALDYDNQADALAFVDRIDPASCRLKVGKEMFTLFGPEFVRELHKRGFSVFLDLKFHDIPNTCSKAVRAAAELGVWMVNVHASGGERMMTASREILEPYGKDRPLLIGVTVLTSMEQSDLAGIGLDLEPQQQVMRLASLTKNSGLDGVVCSAQEASLLKGALGQEFKLVTPGIRPVGADVGDQKRIMTPSKAIESGSDYLVIGRPITQAADPAAVLAEINGTLA

SEQ ID NO: 156270 - DNA, 675 bp, Erythrobacter sp. SD-21
  CDS (1)..(675): transl_table=11
atgagcaatccgatctaccttgccctcgacgtgccgcgcctgcgggatgccgtcgcactggccgaaaaggtcaaggcgcatgtcggcggggtcaagctcggcctggaattcttcaacgcgcacggagcgcacggcgtgcacatgctcgcgcagatcggcctgccgatcttcctcgatctcaagttgcacgatatccccaacaccgttgccggggcgatgcaggcgatccatgtgctcgaaccggccatcgtgacaatccatgcctgcggcggcatcgcgatgatggaagacgccaaggccgccgcaggcgaaaacaccaaggtcgtcggcgtgaccatgctgacaagcctcgacgagcaggacctctcgcgcatgggctttcccgggacgccacacgattacgtgatgcgcctgacggaagcggcgcacacggcgggcctcgacggggtcgtctgctctggtcaggagatcaagtcggttcacgaccagtggaaggacggctatttcgtcgtccccggtctgcgccccgaaggcagcgagatcggcgaccagaaacgcgtcgtcacgccgcgccaggcgcgcgacgacggggccagcgtgctcgtcatcggccgcccgatcagccgcgccgaggaccccgaagccgccgcgcgcgcgatcgaggcgacgctgtag

SEQ ID NO: 156271 - protein, 224 aa, Erythrobacter sp. SD-21
MSNPIYLALDVPRLRDAVALAEKVKAHVGGVKLGLEFFNAHGAHGVHMLAQIGLPIFLDLKLHDIPNTVAGAMQAIHVLEPAIVTIHACGGIAMMEDAKAAAGENTKVVGVTMLTSLDEQDLSRMGFPGTPHDYVMRLTEAAHTAGLDGVVCSGQEIKSVHDQWKDGYFVVPGLRPEGSEIGDQKRVVTPRQARDDGASVLVIGRPISRAEDPEAAARAIEATL

SEQ ID NO: 156272 - DNA, 696 bp, Vibrio shilonii AK1
  CDS (1)..(696): transl_table=11
atgattgaccaaaaagtgattgttgcactggactatgataaccaagccgatgcattagcttttgtcgatagaattgacccaagctcttgccgactaaaagtgggcaaagagatgttcacactatttggtcctgagttcgttcgagagcttcataaacgaggcttctctgtatttctagatcttaagtttcatgacattcctaatacttgctcgaaagcagtacgagctgcagcagagttgggcgtttggatggtaaacgtccatgctggcggtggtgagcgtatgatggcggcatctcgtgagattctagaaccttatggtaaagaccgaccgctgcttattggtgtgaccgtactgacgagtatggagcagtcagatctcgcgggtatcggtattaatgttgagcctcaggagcacgttcttcgtttggctaacttaaccaaagatgctggtttggatggggtggtttgttctgctcaagagtctagcatgctaaaagcacaacttggcaaagagtttaaactagttactccaggtattcgtccagcaggtgctgcagttggtgaccaaaaacgtatcatgacaccagatatggcgattcaggcgggctctgattatcttgtgattggtcgcccaattactcaagcagaaaacccagctcaggttctagcagacatcaatgcgtctttgcgttaa

SEQ ID NO: 156273 - protein, 231 aa, Vibrio shilonii AK1
MIDQKVIVALDYDNQADALAFVDRIDPSSCRLKVGKEMFTLFGPEFVRELHKRGFSVFLDLKFHDIPNTCSKAVRAAAELGVWMVNVHAGGGERMMAASREILEPYGKDRPLLIGVTVLTSMEQSDLAGIGINVEPQEHVLRLANLTKDAGLDGVVCSAQESSMLKAQLGKEFKLVTPGIRPAGAAVGDQKRIMTPDMAIQAGSDYLVIGRPITQAENPAQVLADINASLR

SEQ ID NO: 156274 - DNA, 690 bp, Lentisphaera araneosa HTCC2155
  CDS (1)..(690): transl_table=11
atgactaaattaattgtggctttagatgtagattctttagcagaagctgaaaaagctgttgataaactaggtggtaaagttgaatggtttaaagttggcaagcaattgtttacggctgaaggacctgcaattgtagagatgttgaaaaagaaaggatttaaagtttttcttgatcttaaatttcacgacattccaaatacggtggctcaagcagtgaaatctgccttgtccattggagctgacatggttaatttccatgctacaggaggaagtgaaatgattcgtactgccgttgaaaagaatcgtcccaactaccctaatgcggaattaatagctgttacagtattaacaagtagcggtcagtcagtattagatgaacttcaagttgcaggaacaccagaggatgcggtacttcgttttgcgggtctcgcaaaaaacgctggagcagatggcgtcgtttgttcagcgctagaaattgaagcgctaaaaaaggcttatggttcggaatttaaagtggttgtgccaggtattcgccccaaaggtagttccgtagatgatcagaagcgcattatgactccaaagcaagcatctgatctaggcgccgattatattgtagtaggtcgcccaattatgaaagcagctgaccccgtcgctgcagccgaagctgtgttagcagaattgagtatataa

SEQ ID NO: 156275 - protein, 229 aa, Lentisphaera araneosa HTCC2155
MTKLIVALDVDSLAEAEKAVDKLGGKVEWFKVGKQLFTAEGPAIVEMLKKKGFKVFLDLKFHDIPNTVAQAVKSALSIGADMVNFHATGGSEMIRTAVEKNRPNYPNAELIAVTVLTSSGQSVLDELQVAGTPEDAVLRFAGLAKNAGADGVVCSALEIEALKKAYGSEFKVVVPGIRPKGSSVDDQKRIMTPKQASDLGADYIVVGRPIMKAADPVAAAEAVLAELSI

SEQ ID NO: 156276 - DNA, 711 bp, Marinobacter algicola DG893
  CDS (1)..(711): transl_table=11
atgcaaacccccgatagtccccgaatcatcgttgccctggatttcccctccgatcagcccgcgttggctctggttgatcaactggaccctgcgaagtgtcgccttaaagtcggcaaggaactctttacgcgatcaggtcccggcttggttcgcgaccttcacgcccgcggcttcgacgttttcctggatctgaaatttcacgatatcccgaacacaacgtccgctgccgtggcggccgccgccgacctgggcgtctggatggtgaacgtacatgcctccggcggcgagaaaatgatgaccgcctgtcgcgaccgcctggaaagcttcggcaaggatcggccactgctgattgccgttactgtgctgaccagcatggggccggaggatcttgccggtatcggcatcacgggttccccggaagcccaggtatcccgcttggcaaccctgacccgcaactgcggcctggacggtgtcgtctgctccgctcaggaggctccggctttgaaagcagagcagggcaaggatttcaaactggtcaccccgggtatccgtccgctgtctgctgacaagggagaccagcagcgcatcatgacgcccacagaggccctcaaagccgggtccgactatctggtcatcggtcgcccgattacgcaggctgctgatcctttggctgcgctggaggctatacactgtgaggtggttggcctctaa

SEQ ID NO: 156277 - protein, 236 aa, Marinobacter algicola DG893
MQTPDSPRIIVALDFPSDQPALALVDQLDPAKCRLKVGKELFTRSGPGLVRDLHARGFDVFLDLKFHDIPNTTSAAVAAAADLGVWMVNVHASGGEKMMTACRDRLESFGKDRPLLIAVTVLTSMGPEDLAGIGITGSPEAQVSRLATLTRNCGLDGVVCSAQEAPALKAEQGKDFKLVTPGIRPLSADKGDQQRIMTPTEALKAGSDYLVIGRPITQAADPLAALEAIHCEVVGL

SEQ ID NO: 156278 - DNA, 702 bp, Moritella sp. PE36
  CDS (1)..(702): transl_table=11
atgttgcaagatagtaaagtagttgtcgcacttgattatgctgatgaagcaagtgcattgaattttgttgataagattaatcctagccaatgtcgtctgaaagtaggcaaggaaatgttcacattatttgggcctgaatttgtgcgtaaattagttgcgcgtgactttgatgtgttcttagatcttaagttccatgatattcctaacacggtggcgaaagccgtcgccgcagctgcagagcttggcgtatggatggtgaatgtacatgcctgtggtggccagcgtatgatggaagcggctaaagcggcattagtaccttatggtgataaagcaccaatcttgatcgcagtgactgtgctaaccagtatggagcaagaagatttagcacaaatgggcgttaatattacccctgctgaacaagttattcgtttagcgacgttaacacaaaaaagtggtttagacggtgttgtttgttcttcacaagaagcagcaatgcttaaagaagcattaggtaagtcattccagttaattacgccaggtattcgtcctgcaggcagtgctgcgggtgatcaacgccgtataatgacgccggttgaagcggtagctgcgggtgctgactacttagtgattggtcgtccaatcacacaagctgagtcaccaatgcaagtattaactgaaatcaacgacagtttagcaagttaa

SEQ ID NO: 156279 - protein, 233 aa, Moritella sp. PE36
MLQDSKVVVALDYADEASALNFVDKINPSQCRLKVGKEMFTLFGPEFVRKLVARDFDVFLDLKFHDIPNTVAKAVAAAAELGVWMVNVHACGGQRMMEAAKAALVPYGDKAPILIAVTVLTSMEQEDLAQMGVNITPAEQVIRLATLTQKSGLDGVVCSSQEAAMLKEALGKSFQLITPGIRPAGSAAGDQRRIMTPVEAVAAGADYLVIGRPITQAESPMQVLTEINDSLAS

SEQ ID NO: 156280 - DNA, 726 bp, Plesiocystis pacifica SIR-1
  CDS (1)..(726): transl_table=11
atgaccccccgcgagcgcctgatcgtcgccctggacgtccccgacgaagccaaagccctcgacctcgccggtcgcctcgccggtcacgtcggcatgctcaagatcggcctcgagctcttcgtcgccgagggcccggccgtggtccgcaaggtcaaagagcgccaccccgagctcgacatcttcctcgacctcaagctccacgacatccccaacaccatgcagggggcgatccgctcggccgccaagctgggcgcgcgcttcatcaccgtgcacgccggctcgggcgtggcgcacctgcgcgcgtgcgccgagcaagctcgagaggccagcgcggccgcgggccacggcgagctcggcgtgctcgcggtcaccgtgctgaccagccaagacgagcaagcttgccgcgaggccggccacacccgcagccccgccgagctcgtcgccatgcgggcccagtgcgccgtcgaggctggctgcgccgggctggtgtgctcgggccaggagctcgaggcgatcgcacccgcgacgccctcgctgttccgcgtggtcccgggcattcgtccggcgggttcggccgttggggatcaaaagcgggtcatgactccgggtaaagcgatcgccgctggcgcgacgcacctggtcgtgggtcgaccgatccgcaacgcggacgatccggccgcggccgcggacgccatcgtcgccgagatcgcagccgcgctgggctga

SEQ ID NO: 156281 - protein, 241 aa, Plesiocystis pacifica SIR-1
MTPRERLIVALDVPDEAKALDLAGRLAGHVGMLKIGLELFVAEGPAVVRKVKERHPELDIFLDLKLHDIPNTMQGAIRSAAKLGARFITVHAGSGVAHLRACAEQAREASAAAGHGELGVLAVTVLTSQDEQACREAGHTRSPAELVAMRAQCAVEAGCAGLVCSGQELEAIAPATPSLFRVVPGIRPAGSAVGDQKRVMTPGKAIAAGATHLVVGRPIRNADDPAAAADAIVAEIAAALG

SEQ ID NO: 156282 - DNA, 696 bp, Vibrio cholerae MZO-3
  CDS (1)..(696): transl_table=11
atgaacgacccaaaagtgattgttgcactggactatgacaatctggcggatgcgctcgcgtttgtggacaaaattgatccaagcacatgtcgactcaaagtgggtaaagagatgtttactctatttggtcctgattttgtccgtgagctgcataaacgaggtttttctgtgtttctggatcttaaatttcacgatattccgaatacctgttcaaaagcggtgaaagctgccgctgagcttggggtttggatggtgaatgtgcacgcgagtggtggcgagcgaatgatggcagcatcgcgtgagattctggagccgtatggtaaagatcgcccactgctgattggtgtcactgtattgaccagtatggaatctgccgatttacaaggtattggcatcttgagtgcgccacaagatcatgtgctgcgattagcaacgctcaccaaaaatgctggtcttgatggtgtagtatgctccgcacaagaggcatcactattaaagcaacatttagggcgtgaattcaaactggtgacgccaggaattcgtccagcgggttcagagcaaggcgatcaacgccgtattatgactccagcccaagccattgcctctggttccgattatctcgtgatcggtcgccctatcactcaagccgcacatcctgaagtggttctggaagagataaacagctctttagtttag

SEQ ID NO: 156283 - protein, 231 aa, Vibrio cholerae MZO-3
MNDPKVIVALDYDNLADALAFVDKIDPSTCRLKVGKEMFTLFGPDFVRELHKRGFSVFLDLKFHDIPNTCSKAVKAAAELGVWMVNVHASGGERMMAASREILEPYGKDRPLLIGVTVLTSMESADLQGIGILSAPQDHVLRLATLTKNAGLDGVVCSAQEASLLKQHLGREFKLVTPGIRPAGSEQGDQRRIMTPAQAIASGSDYLVIGRPITQAAHPEVVLEEINSSLV

SEQ ID NO: 156284 - DNA, 702 bp, Beggiatoa sp. PS
  CDS (1)..(702): transl_table=11
atgagtcccttaattattgccttagactttgcgcaaccagaacctgctctcacccttgctaaacaattaggtagtgaacgctgccgcgttaaagtgggtaaagaattattcactcgtagtggtccctttgttgttgaagaattagttaaacaaggttttgacgtttttttagatttaaaatatcacgatatacccaataccgttgcccaggcctgtttagccgcagcggatttaggtgtgtggatgattaatgtccatgcgttaggtggacgcaatatgttattagcggcccgtgaagctttagaaaaatgttctcattgcccattattagttgcagtaacgattttaaccagctttgatcggtttaatttgtatgaagtgggtttgcatagcggtttagaagataatgtgttgcgcttagctcgtttatctcatgcttgtggcttagatgggattgtctgttccccccgtgaaattgtagctgttcataaaatgcttgagatggaattgaaaaccgattttttattagtaacccctggtattcgttcaaaaaaaagttcaaatgatgatcaaaaacgtgtgatgacaccggcagaagccttaaaattaggagcggattatttagtgattggtcgtccggtaacagcagccccttcaccattgcaagcattattagaaatagaagcttcgctcagcgaatag

SEQ ID NO: 156285 - protein, 233 aa, Beggiatoa sp. PS
MSPLIIALDFAQPEPALTLAKQLGSERCRVKVGKELFTRSGPFVVEELVKQGFDVFLDLKYHDIPNTVAQACLAAADLGVWMINVHALGGRNMLLAAREALEKCSHCPLLVAVTILTSFDRFNLYEVGLHSGLEDNVLRLARLSHACGLDGIVCSPREIVAVHKMLEMELKTDFLLVTPGIRSKKSSNDDQKRVMTPAEALKLGADYLVIGRPVTAAPSPLQALLEIEASLSE

SEQ ID NO: 156286 - DNA, 702 bp, Opitutaceae bacterium TAV2
  CDS (1)..(702): transl_table=11
atgtcctgcgaactcattctggccctcgatgttcccacgcgcgaagacgccgcgccccttctccgccaactccgcggctcgctccgctgggtcaaaatcggactccagatgttcaccgcctacggtcccgactatgtgcgctccgtggccgaccaaggatttgatattttcctcgacctcaaactgcacgacatccccaacaccgtcgccaaggctgttgaatcccttgccccgcttcccatcggaatgctcaccctccacacctccggcggacgcgagatgatgcaagctgcgcgcaccgcgcaacaagccaccaagcccaacctgctcctgctcggcgtcaccgtcctcacctccatggacgccaccggcctcgccgaactcggcgtcgccgccgatcccgccgcgcaagtctcccgcctcggcaacctcgcctccgccgccggactgcgcggcctggtctgttcgcccctcgaagtcacacttctgcgcagtcaactccccgccgacgtcaagctcgtgacccccggcatccgccccgccggtgaagccggcggcgacgaccagaaacgcatcatgacccccgccgaggccgcccgcgtgggctccagttacatcgtagtgggccgcccgatactcaaagccgccgatcccgctgccgccgcccgcgccatccaggccgagttggggcatcggtgctga

SEQ ID NO: 156287 - protein, 233 aa, Opitutaceae bacterium TAV2
MSCELILALDVPTREDAAPLLRQLRGSLRWVKIGLQMFTAYGPDYVRSVADQGFDIFLDLKLHDIPNTVAKAVESLAPLPIGMLTLHTSGGREMMQAARTAQQATKPNLLLLGVTVLTSMDATGLAELGVAADPAAQVSRLGNLASAAGLRGLVCSPLEVTLLRSQLPADVKLVTPGIRPAGEAGGDDQKRIMTPAEAARVGSSYIVVGRPILKAADPAAAARAIQAELGHRC

SEQ ID NO: 156288 - DNA, 696 bp, Shewanella benthica KT99
  CDS (1)..(696): transl_table=11
atgagtaataagtcgattttagtcgccctggattttgatgataagcatgctgctttgcaactggttgatcaattagatcctagtatgtgccgtgtcaaagtaggcaaggagatgtttactctttttggacccgaatttatcaaggcgctgcataaacgtgatttcgacgtgttcctggatcttaaattccacgatatccctaataccgtcgccaaggctgtcacggcagccgccgagcttggcgtgtggatgaccaacgtccatgccagcggcggtctcgccatgatgcaagcggctaagaaagcgcttgagccatttggcgataaggcacccatactgatagccgtcacagtgctcacctccatgagtgatgaagaacttaagcttatcggcatcgatgtccccgcgttcgagcatgtgcagcgtctcgccaaacttactcaagaagcgggattagacggtgttgtttgttcggcacatgaagcacaagtgctaaaatctaagttaggtaaagaatttaaactgtgtacgccgggtattcgtcccgttggcgccgataagggtgaccaacataggatcatgacgccaccacaagcgattgcagccggttctgactatttagtgataggaagacctatcactaaagctgaggatccactggcaacgcttcaagcgatacacgcatcgttgaaataa

SEQ ID NO: 156289 - protein, 231 aa, Shewanella benthica KT99
MSNKSILVALDFDDKHAALQLVDQLDPSMCRVKVGKEMFTLFGPEFIKALHKRDFDVFLDLKFHDIPNTVAKAVTAAAELGVWMTNVHASGGLAMMQAAKKALEPFGDKAPILIAVTVLTSMSDEELKLIGIDVPAFEHVQRLAKLTQEAGLDGVVCSAHEAQVLKSKLGKEFKLCTPGIRPVGADKGDQHRIMTPPQAIAAGSDYLVIGRPITKAEDPLATLQAIHASLK

SEQ ID NO: 156290 - DNA, 741 bp, Hoeflea phototrophica DFL-43
  CDS (1)..(741): transl_table=11
atgccagatgccatgcttgatttgaatgcttctgccccgcagacggccgatccgcgcctgatcgtggggctcgatgtccccacagtcgccgaggccgtagccaaggtggagcagatcggcgatgaagccgttttcttcaagatcggctatcaactcgcatttgcaggcggcctgtctctggcgcgcgatctcaaggcctcgggccgcaaggtctttctcgacatgaagttgctcgatatcgacaatacggtggccaagggcgtcgagaacatcgtcaagatgggcgtcgacatgcttacacttcatgcctatccgaaggcgatgagggctgcggtggaagctgccaaaggcagcgatctttgtctgcttggcgtaacggttctaacgtcaatggatgctgccgacctcaaagaagcgggttacgcgctgtctcccgaggagctggtgctgcgccgcgtagcgcaggcccgtactgcgggtatgggtggaattgtctgcgcggcgaccgaagccagagccgtgcgcgaggtggtcggaccggacatggcaattgtcacgccgggcatccggcccgccggtgctgatcatggcgatcagaaacgggtgatgaccccggcggatgcgctcatggcgggcgccacccatctggtggtggcgaggcccatcgttgccgctgaagacccggccgctgccgcgcgcgccattcgcatggaaatgtctcaatatcaggagaaggtttga

SEQ ID NO: 156291 - protein, 246 aa, Hoeflea phototrophica DFL-43
MPDAMLDLNASAPQTADPRLIVGLDVPTVAEAVAKVEQIGDEAVFFKIGYQLAFAGGLSLARDLKASGRKVFLDMKLLDIDNTVAKGVENIVKMGVDMLTLHAYPKAMRAAVEAAKGSDLCLLGVTVLTSMDAADLKEAGYALSPEELVLRRVAQARTAGMGGIVCAATEARAVREVVGPDMAIVTPGIRPAGADHGDQKRVMTPADALMAGATHLVVARPIVAAEDPAAAARAIRMEMSQYQEKV

SEQ ID NO: 156292 - DNA, 717 bp, Carnobacterium sp. AT7
  CDS (1)..(717): transl_table=11
atgataactagacccattattgctttagatttcgctacggtgtctcaagttgacgcgtttttaagcacgtttaacggcgaatctttatttgttaaagtaggtatggaactgttttatcaaaatgggccagcaatagtcacgcatcttaaacaattaggccatgatgtttttttggatttaaagctacatgatattcccaatacagttcaacgttccatgaagggacttacagcattagaggtcgatatgctcaacgttcatgcagcgggtggccaagacatgatggaagccgcgatggaagggattctttcaggcacaccaactggtaaaaagcgaccgaagctgattgctgtcacacaattgacttcgacaacgccacttgctatgcagcaagaacaactgattgctgttccattgatggaaagtgtgatccattacgccaaattaactcagttagctgggttagacggtgtggtgtgttctgcattagaagcacgtaaaataaaagaaaatactggaaaagaatttttatgtgtcactccaggaatacgtccagctggaaccgatgtaggagatcaaaaacgcatttcgacgcctgctatggctaagaaagaaggcgcatcctatattgttgtcggccgtcctatcacacaagctgatgatccattagcggcttatcggacaataaaagagcaatggaacggagtggataaataa

SEQ ID NO: 156293 - protein, 238 aa, Carnobacterium sp. AT7
MITRPIIALDFATVSQVDAFLSTFNGESLFVKVGMELFYQNGPAIVTHLKQLGHDVFLDLKLHDIPNTVQRSMKGLTALEVDMLNVHAAGGQDMMEAAMEGILSGTPTGKKRPKLIAVTQLTSTTPLAMQQEQLIAVPLMESVIHYAKLTQLAGLDGVVCSALEARKIKENTGKEFLCVTPGIRPAGTDVGDQKRISTPAMAKKEGASYIVVGRPITQADDPLAAYRTIKEQWNGVDK

SEQ ID NO: 156294 - DNA, 702 bp, Vibrio campbellii AND4
  CDS (1)..(702): transl_table=11
atgatcgaccaaaaagttattgttgcactggattatgataaccaagcggatgcgcttacgtttgtagatagaattgatcctgcgtcttgccgcctgaaagtaggcaaggaaatgtttacgctatttggtcctgattttgtacgtgagcttcataaacgcggtttctctgtcttcctggacctgaaatttcatgatatcccgaacacatgttcaaaagctgttcgagctgccgctgagcttggtgtatggatggtaaacgttcatgcgagtggcggtgaacgtatgatggcggcttctcgtgaggtccttgaaccttacggtaaagaccgtccattactgatcggtgtgactgtgcttacaagcatggaacagagtgatttggcaggtattggtttgaatgttgcgcctcaagatcaagtgatgcgcttagcaacgctgacaaagaactcaggccttgatggtgttgtgtgctctgcgcaagagtcttctttgcttaagggtaagcttggtaatgaatttaagctagtgacaccaggcattcgtcctgcgggctctgagcaaggtgaccaacgccgcatcatgacgccagtagatgcaatccaagcaggatcagactatttggtcattggtcgtcctatcactcaggcggtggaacctgcatcggttcttcagtcaatcaacgctagcttagcgaatatgtaa

SEQ ID NO: 156295 - protein, 233 aa, Vibrio campbellii AND4
MIDQKVIVALDYDNQADALTFVDRIDPASCRLKVGKEMFTLFGPDFVRELHKRGFSVFLDLKFHDIPNTCSKAVRAAAELGVWMVNVHASGGERMMAASREVLEPYGKDRPLLIGVTVLTSMEQSDLAGIGLNVAPQDQVMRLATLTKNSGLDGVVCSAQESSLLKGKLGNEFKLVTPGIRPAGSEQGDQRRIMTPVDAIQAGSDYLVIGRPITQAVEPASVLQSINASLANM

SEQ ID NO: 156296 - DNA, 708 bp, Rhizobium leguminosarum bv. trifolii WSM1325
  CDS (1)..(708): transl_table=11
atggacgcacgcgagcggttgatcgtcggcctggatgttccaacgatcggcgaggcggaaagactggtttccacgctcggcgacgacattctcttctacaagatcggctatcagctggtctttgccggcggcctggaattcgcccgtgatcttgccgcaagcggcaagaagatctttctcgacatgaagctgctcgacatcgacaacactgtcgcctccggcgtcgagaacatcgccaagatgggcatgtcgatgctgacgctgcatgcctatccgaaagccatgaaggcagcggtcgaggccgcagccggctccggcctctgcctgctcggcgtgaccgtgctgacctcgatggatgccgacgaccttgccgaggcgggctacagccaggatccgcacagcctggtgctgcgccgcgccgaacaggcgcgcgcagccggcatgggcggtatcgtctgctcggcggaagaagcggctgcagtgcgcgaaatcgtcggacccgacatggccatcgtcacccccggcattcgccctgatggtagcgacaagggcgaccagaagcgggtgatgacgcctttcgacgcgctgaaggcgggagcgacgcatctcgttgtcggccggcctgtcgtcaaggctccggatccccgcgatgccgcccgcgcgatcctcagcgagatggtgagcgcgctctggccggcaaatcgctga

SEQ ID NO: 156297 - protein, 235 aa, Rhizobium leguminosarum bv. trifolii WSM1325
MDARERLIVGLDVPTIGEAERLVSTLGDDILFYKIGYQLVFAGGLEFARDLAASGKKIFLDMKLLDIDNTVASGVENIAKMGMSMLTLHAYPKAMKAAVEAAAGSGLCLLGVTVLTSMDADDLAEAGYSQDPHSLVLRRAEQARAAGMGGIVCSAEEAAAVREIVGPDMAIVTPGIRPDGSDKGDQKRVMTPFDALKAGATHLVVGRPVVKAPDPRDAARAILSEMVSALWPANR

SEQ ID NO: 156298 - DNA, 726 bp, Paenibacillus larvae subsp. larvae BRL-230010
  CDS (1)..(726): transl_table=11
atgagctcacgggaacagttggctgaaaagataatggtcgctttggattatccaacggccgaaaaggcggaacagctcattcagcagcttaaaggaattccttgctacatgaaagtaggaatgcagctgttttatgcagaaggtcccggtattgtggtacagttaaaagagcagggatacaaagtatttttggatctaaagcttcatgacattccaaatacggtaaaaggtacggcggaaagtcttacccggctgggaattgacatgtttaatgtgcatgccggcggcggacgtgctatgatggaagcggccagggaaggaatggagcgggctctgggaagcggtcaaacgaggccttggttcattggggtcactcagttaacaagtaccagccgtgaagttttaaataaggaaatcggaattgagggaacggtcgaggaagcggtaattcattatgctgggctggcaagaaaagccgggttagatggtgttgtggcttcaccgctggaagtggcctacctcaaagaaacgttcggcccctcgattcttaccgtaaccccaggcattcgccccaggggaactgcaattggtgaccagacgcgtatcatgacaccggaagaggcaatacatgccgggacggattatatggttatcggaaggccgataacagcagcaccagagccaagagcagcaatggagaacatcttggattccctcttggactga

SEQ ID NO: 156299 - protein, 241 aa, Paenibacillus larvae subsp. larvae BRL-230010
MSSREQLAEKIMVALDYPTAEKAEQLIQQLKGIPCYMKVGMQLFYAEGPGIVVQLKEQGYKVFLDLKLHDIPNTVKGTAESLTRLGIDMFNVHAGGGRAMMEAAREGMERALGSGQTRPWFIGVTQLTSTSREVLNKEIGIEGTVEEAVIHYAGLARKAGLDGVVASPLEVAYLKETFGPSILTVTPGIRPRGTAIGDQTRIMTPEEAIHAGTDYMVIGRPITAAPEPRAAMENILDSLLD

SEQ ID NO: 156300 - DNA, 798 bp, Salmonella enterica subsp. enterica serovar Saintpaul str. SARA29
  CDS (1)..(798): transl_table=11
atgcacgccgtttatccaatttgcgccacttccggtgcccatcatcaagaaggtctggtcatgacgtttactgcttcatcttcttcctgcgctgttactgaatcgcctgtcgttgtggcgttggattaccatgaacgcgataaagccctggcgtttgtcgataaaatcgatcctcgcgattgtcgcttaaaagtgggcaaagagatgttcacgctgtttggtccacaactcgttcgggatctccagcagcgtgggtttgatgtctttcttgatctaaaatttcatgatattcccaacaccacggcccgggcagtcgccgcagcggcagacctgggcgtctggatggtaaacgttcacgcgtctggtggggcgagaatgatggccgcagcgcgcgacgcgctggcgccattcggtaaagatgcgccgttgctcattgccgtgaccgtgttgaccagtatggaaaccagcgatctacacgatctgggcgtgacgttgtcaccggcggaacatgcggagcggctggcgcgcctgacgcagcaatgcgggctggatggcgtggtctgttccgctcaggaagctgtcagatttaaacaggcctttggcgctgcatttaagctggtgacgccgggcattcggcccgcaggcagcgaggcaggcgaccagcgacgcattatgacgcccgaacaggcattatccgccggcgtcgactatatggtgattggccgcccggttacgcaatcggtagatccggcgcaaacgctgaaggatattaacgcgtcactgaaacgggaggcataa

SEQ ID NO: 156301 - protein, 265 aa, Salmonella enterica subsp. enterica serovar Saintpaul str. SARA29
MHAVYPICATSGAHHQEGLVMTFTASSSSCAVTESPVVVALDYHERDKALAFVDKIDPRDCRLKVGKEMFTLFGPQLVRDLQQRGFDVFLDLKFHDIPNTTARAVAAAADLGVWMVNVHASGGARMMAAARDALAPFGKDAPLLIAVTVLTSMETSDLHDLGVTLSPAEHAERLARLTQQCGLDGVVCSAQEAVRFKQAFGAAFKLVTPGIRPAGSEAGDQRRIMTPEQALSAGVDYMVIGRPVTQSVDPAQTLKDINASLKREA

SEQ ID NO: 156302 - DNA, 693 bp, Haemophilus parasuis 29755
  CDS (1)..(693): transl_table=11
atggacaacaaaattatcgtcgcccttgactatgaaacagaagccgaagccctcaatttcgttgatcaagtcgatccgtccctttgtcgcttaaaagtgggcaaagagatgtttaccacattgggtacacactttgtgaaacagttacaagaccgcaaatttgatgtctttttagatttaaaatatcacgacattcctaacaccgttgcaagagccgtgcattcggcggcagatttgggggtgtggatggtggatttacacgcctgcggcggtttacgaatgatggaaaccgcaaaacaaattttagagccttacggcaaagatgcaccattattgattggtgtgactgtgctaaccagtatggaagatttagatttattacaaatcgggattaatgcgtcaccgatggaacaagttattcgtcttgcccatttgtgccaacgtgcagggttagatggtgttgtttgctctccacaagaagttgaggtattaagaactcactgtggcaaagattttaaactcgtcacgccaggtattcgtcctgaagggagtgattttggcgatcagcgtcgtgtgatgaccccaaaacaagcgattgaaataggatcagactatttggtgatcggccgtcctattacccaagcgactgatcctcttgcagtattaaaatcaattaatcaatctatcgcctaa

SEQ ID NO: 156303 - protein, 230 aa, Haemophilus parasuis 29755
MDNKIIVALDYETEAEALNFVDQVDPSLCRLKVGKEMFTTLGTHFVKQLQDRKFDVFLDLKYHDIPNTVARAVHSAADLGVWMVDLHACGGLRMMETAKQILEPYGKDAPLLIGVTVLTSMEDLDLLQIGINASPMEQVIRLAHLCQRAGLDGVVCSPQEVEVLRTHCGKDFKLVTPGIRPEGSDFGDQRRVMTPKQAIEIGSDYLVIGRPITQATDPLAVLKSINQSIA

SEQ ID NO: 156304 - DNA, 798 bp, Salmonella enterica
  subsp. enterica serovar Weltevreden str. HI_N05-537
  CDS (1)..(798): transl_table=11
atgcacgccgtttatccaatttgcgccacttccggtgcccatcatcaagaaggtctggtcatgacgtttactgcttcatcttcttcctgcgctattactgaatcgcctgtcgttgtggcgttggattaccatgaacgcgataaagccctggcgtttgtcgataaaatcgatcctcgcgattgtcgcttaaaagtgggcaaagagatgttcacgctgtttggtccacagctcgttcgggatctccagcaacgtgggtttgatgtctttcttgatctaaaatttcatgatattcccaacaccacggcccgggcagtcgccgcagcggcagacctgggcgtctggatggtaaacgttcacgcgtctggcggggcgagaatgatggccgcagcgcgcgacgcgctggcgccattcggtaaagatgcgccgttactcattgccgtgaccgtgttgaccagtatggaaaccagcgatctgcgcgatctgggcgtgacgttgtcaccggcggaacatgcggagcggctggcgcgcctgacgcagcaatgcgggctggatggcgtggtctgttccgctcaggaagcggtcagatttaaacaggcctttggcgctgcatttaagctggtgacgccgggcattcggcccgcaggcagcgaggcaggcgaccagcgacgcattatgacgcccgaacaggcattatccgccggcgtcgactatatggtgattggccgcccggttacgcaatcggtagatccggcgcaaacgctgaaggatattaacgcgtcactgaaacgggaggcataa

SEQ ID NO: 156305 - protein, 265 aa, Salmonella enterica
  subsp. enterica serovar Weltevreden str. HI_N05-537
MHAVYPICATSGAHHQEGLVMTFTASSSSCAITESPVVVALDYHERDKALAFVDKIDPRDCRLKVGKEMFTLFGPQLVRDLQQRGFDVFLDLKFHDIPNTTARAVAAAADLGVWMVNVHASGGARMMAAARDALAPFGKDAPLLIAVTVLTSMETSDLRDLGVTLSPAEHAERLARLTQQCGLDGVVCSAQEAVRFKQAFGAAFKLVTPGIRPAGSEAGDQRRIMTPEQALSAGVDYMVIGRPVTQSVDPAQTLKDINASLKREA

SEQ ID NO: 156306 - DNA, 738 bp, Escherichia albertii TW07627
  CDS (1)..(738): transl_table=11
atgacgttatctgcttcatcttcttcctgtgctgttacgaactctcctgtcgttgttgccctcgattataataatcgtgatgctgcgttggcatttgtcgacaagattgacccacgcgattgtcgcctgaaagtaggcaaagagatgtttacgctgtttggaccgcagtttgttcgtgaactgcaacagcgcggttttgatattttcctcgacctgaaattccacgatattcctaacactgcggcgcatgccgtggctgccgccgccgatttaggcgtgtggatggtgaacgttcatgcctctggcggtgcgcggatgatgaccgcggcacgagaagcgctggttccatttggtaaagacgcgccgttgtttatagcggtaaccgtgctgaccagtatggaagccagcgatctggctgatcttggagtgacactgtcacctgctgattacgcagaacgcctggcagcgctgacgcaaaaatgtggtcttgatggtgtagtttgttcggctcaggaagcggtacgttttaaacaagcatttggtcaggatttcaaacttgttacccctggcattcgcccgcaggggagtgatgctggcgaccagcgccgtattatgacgccagaacaggcactggctgccggagttgattatatggtgatcgggcgcccggttactcaatcagtagatccagagcaaacgctgaaagcgatcaacgcttcattacaacggagtgcatga

SEQ ID NO: 156307 - protein, 245 aa, Escherichia albertii TW07627
MTLSASSSSCAVTNSPVVVALDYNNRDAALAFVDKIDPRDCRLKVGKEMFTLFGPQFVRELQQRGFDIFLDLKFHDIPNTAAHAVAAAADLGVWMVNVHASGGARMMTAAREALVPFGKDAPLFIAVTVLTSMEASDLADLGVTLSPADYAERLAALTQKCGLDGVVCSAQEAVRFKQAFGQDFKLVTPGIRPQGSDAGDQRRIMTPEQALAAGVDYMVIGRPVTQSVDPEQTLKAINASLQRSA

SEQ ID NO: 156308 - DNA, 693 bp, Streptococcus infantarius subsp. infantarius ATCC BAA-102
  CDS (1)..(693): transl_table=11
atgcacgaaagtcgtccgattattgctcttgattttccatcatttgatgatgtaaaatcatttcttgctttgtttcctgcagatgagaagctctatgtcaagattggtatggaactttattatgctgaagggccagagattgttcgttatgtgaaatctcttggacactcagtcttcctagatttgaaattgcatgacattccgaatacggttaaatctgcaatgcgtgtgctttcaaatcttggtgttgacatgactaatgttcacgcagctggtggtgttgagatgatgaaagcggcgcgtgaagggcttggacaaggtccaaaattaattgcggtaacacagttaacatcaacatcagaagagcaaatgaaagaagatcaaaatatccagacaagtttggttgattctgtgcttcattatgcgaaaaaagctgaagaagctggtcttgatggcgttgtctgctcggcttgcgaggttgctgttatcaaagaggcaacgtcagatgattttgtttgtttgacaccaggtattcgcccagcaggagcttcggttggtgaccaaaaacgcgtcatgacgccaagtcaagcatcagctatcggatcaagttatatcgttgttggacgaccaattactaaagctgaagatccagtggcagcttacaaagcgatttacggcgaatggaacgcttag

SEQ ID NO: 156309 - protein, 230 aa, Streptococcus infantarius subsp. infantarius ATCC BAA-102
MHESRPIIALDFPSFDDVKSFLALFPADEKLYVKIGMELYYAEGPEIVRYVKSLGHSVFLDLKLHDIPNTVKSAMRVLSNLGVDMTNVHAAGGVEMMKAAREGLGQGPKLIAVTQLTSTSEEQMKEDQNIQTSLVDSVLHYAKKAEEAGLDGVVCSACEVAVIKEATSDDFVCLTPGIRPAGASVGDQKRVMTPSQASAIGSSYIVVGRPITKAEDPVAAYKAIYGEWNA

SEQ ID NO: 156310 - DNA, 738 bp, Providencia stuartii ATCC 25827
  CDS (1)..(738): transl_table=11
atgatttcttcaactgagaaccacgctcgcgtatctactcactcgccagttattgttgcgctcgattatgaagatgcaaacgcggcattggcatttgttgaccttattgatccgcgtgaatgtcgtttgaaagtcggtaaagagatgtttaccttcaatggccctcaatttgtgaaatcactacaccaacgtggttttgatgtatttctcgatttaaaatttcacgatattcctaatacggttgcgcgtgcggttggggcagcagcagaaatgggcgtttggatggttaacgttcatgctggtggtggcagccgtatgatggaagcggctcgtcaggcattagagccttatggaaaagaggcgccattattaacagcggtcactgttttaaccagtatggatcaatccgatctgactggcattggtattaatgctacgccagctgagcatgctgaacgtttagctttattgacaaaagcatgtggcttagatggtgtggtgtgttcagcacatgaagctgcaagactgaaatcattgtgtggtgatgattttaaattagtgacaccaggtattcgcccaattggtagtgatgttggggatcagcgccgtatcatgacacctcaagaagcattaaaagtcggggttgattatatggttatcggccgtcctattacgcgtagtgataaccctgcactcacattaaagcagatcaaccaatctattaaggattgtgcatga

SEQ ID NO: 156311 - protein, 245 aa, Providencia stuartii ATCC 25827
MISSTENHARVSTHSPVIVALDYEDANAALAFVDLIDPRECRLKVGKEMFTFNGPQFVKSLHQRGFDVFLDLKFHDIPNTVARAVGAAAEMGVWMVNVHAGGGSRMMEAARQALEPYGKEAPLLTAVTVLTSMDQSDLTGIGINATPAEHAERLALLTKACGLDGVVCSAHEAARLKSLCGDDFKLVTPGIRPIGSDVGDQRRIMTPQEALKVGVDYMVIGRPITRSDNPALTLKQINQSIKDCA

SEQ ID NO: 156312 - DNA, 798 bp, Escherichia coli O157:H7 str. EC4113
  CDS (1)..(798): transl_table=11
atgctcgccgtttacctgtttcgcgccacttccggtgcccatcatcaagaaggtctggtcatgacgttaactgcttcatcttcttcccgcgctgttacgaattctcctgtggttgttgcccttgattatcataatcgtgatgccgcgctggcctttgtcgacaagatcgacccacgcgattgtcgtctgaaggtcggcaaagagatgtttacattgtttgggccacagtttgtgcgcgaacttcaacagcgtggttttgatatctttcttgacctgaaattccacgatatccccaacactgcagcgcacgctgtcgctgctgcagctgacttaggcgtgtggatggtgaatgttcatgcctctggtggggcgcgtatgatgaccgcagcgcgtgaggcactggttccgtttggcaaagatgcaccgcttttgattgctgtgacagtgttgaccagcatggaagccagcgacctggccgatcttggcgtgacactgtcacctgcagattatgcagaacgtctggcagcactgacgcaaaaatgtggccttgatggtgtggtgtgttctgctcaggaagctgtgcgctttaaacaggtattcggtcaggagttcaaactggttacgccgggcattcgtccgcaggggagtgaagctggtgaccagcgccgcattatgacgccagaacaggcgttggcggctggtgttgattatatggtgattggtcgcccggtaacgcaatcggtagatccagcgcagacgctgaaagcgatcaacgcctctttacagcggagtgcatga

SEQ ID NO: 156313 - protein, 265 aa, Escherichia coli O157:H7 str. EC4113
MLAVYLFRATSGAHHQEGLVMTLTASSSSRAVTNSPVVVALDYHNRDAALAFVDKIDPRDCRLKVGKEMFTLFGPQFVRELQQRGFDIFLDLKFHDIPNTAAHAVAAAADLGVWMVNVHASGGARMMTAAREALVPFGKDAPLLIAVTVLTSMEASDLADLGVTLSPADYAERLAALTQKCGLDGVVCSAQEAVRFKQVFGQEFKLVTPGIRPQGSEAGDQRRIMTPEQALAAGVDYMVIGRPVTQSVDPAQTLKAINASLQRSA

SEQ ID NO: 156314 - DNA, 690 bp, Shigella dysenteriae 1012
  CDS (1)..(690): transl_table=11
atggttgttgcccttgattatcataatcgtgatgacgcgctgtcctttgtcgacaagatcgacccacgcgattgtcgtctgaaggtcggcaaagagatgtttacattgtttgggccacagtttgtgcgcgaacttcaacaacgtggttttgatatctttcttgacctgaaattccacgatatccccaacactgtagcgcacgctgtcgctgctgcagctgacttaggcgtgtggatggtgaatgttcatgcctctggtggggcgcgtatgatgaccgcagcgcgtgaggcactggttccgtttggcaaagatgcaccgcttttgattgctgtgacagtgttgaccagcatggaagccagcgacctagccgatcttggcgtgacactgtcacctgcagattatgcagaacgtctggcggcactgacgcaaaaatgtggccttgatggtgtggtgtgttctgcacaggaagctgtgcgctttaaacaggtattcggtcaggagttcaaactggttacgccgggcattcgtccgcaggggagtgaagctggtgaccagcgccgcattatgacgccagaagaggcgttggcggctggtgttgattatatggtgattggtcgcccggtaacgcaatcggtagatccagcgcagacgctgaaagcgatcaacgcctctttacagcggagtgcatga

SEQ ID NO: 156315 - protein, 229 aa, Shigella dysenteriae 1012
MVVALDYHNRDDALSFVDKIDPRDCRLKVGKEMFTLFGPQFVRELQQRGFDIFLDLKFHDIPNTVAHAVAAAADLGVWMVNVHASGGARMMTAAREALVPFGKDAPLLIAVTVLTSMEASDLADLGVTLSPADYAERLAALTQKCGLDGVVCSAQEAVRFKQVFGQEFKLVTPGIRPQGSEAGDQRRIMTPEEALAAGVDYMVIGRPVTQSVDPAQTLKAINASLQRSA

SEQ ID NO: 156316 - DNA, 798 bp, Salmonella enterica subsp. enterica serovar Kentucky str. CVM29188
  CDS (1)..(798): transl_table=11
atgcacgccgtttatccaatttgcgccacttccggtgcccatcatcaagaaggtctggtcatgacgtttactgcttcatcttcttcctgcgctattactgaatcgcctgtcgttgtggcgttggattaccatgaacgcgataaagccctggcgtttgtcgataaaatcgatcctcgcgattgtcgcttaaaagtgggcaaagagatgttcacgctgtttggtccacagctcgttcgggatctccagcaacgtgggtttgatgtctttcttgatctaaaatttcatgatattcccaacaccacggcccgggcagtcgccgcagcggcagacctgggcgtctggatggtaaacgttcacgcgtctggcggggcgagaatgatggccgcagcgcgcgacgcgctggcgccattcggtaaagatgcgccgttgctcattgccgtgaccgtgttgaccagtatggaaaccagcgatctgcgtgatcttggcgtgacgttgtcaccggcggaacatgcggagcggctggcgcgcctgacgcagcaatgcgggctggatggcgtggtctgttccgctcaggaagcggtcagatttaaacaggtctttggcgctgcatttaagctggtgacgccgggcattcggcccgcaggcagcgaggcaggcgaccagcgacgcattatgacgcccgaacaggcattatccgccggcgtcgactatatggtgattggccgcccggttacgcaatcagtagatccggcgcaaacgctgaaggatattaacgcgtcactgaaacgggaggcataa

SEQ ID NO: 156317 - protein, 265 aa, Salmonella enterica subsp. enterica serovar Kentucky str. CVM29188
MHAVYPICATSGAHHQEGLVMTFTASSSSCAITESPVVVALDYHERDKALAFVDKIDPRDCRLKVGKEMFTLFGPQLVRDLQQRGFDVFLDLKFHDIPNTTARAVAAAADLGVWMVNVHASGGARMMAAARDALAPFGKDAPLLIAVTVLTSMETSDLRDLGVTLSPAEHAERLARLTQQCGLDGVVCSAQEAVRFKQVFGAAFKLVTPGIRPAGSEAGDQRRIMTPEQALSAGVDYMVIGRPVTQSVDPAQTLKDINASLKREA

SEQ ID NO: 156318 - DNA, 717 bp, Clostridium difficile QCD-23m63
  CDS (1)..(717): transl_table=11
atgataaatggtaaagaaaagttgatagttgcaattgatactgacgaatttgataaagctaaagaactaatagacaaattagaagatagtgtagatatatttaaagtagggttagagcaatatgttgccacaaaaggtaaaacgatagattatcttaaagaaaaaggcaaaaaaatatttttagaccttaaattccacgatataccaaatactatgaaaagtgcagtgagagctgcagtcagagataatgtttggttaatgacaatacatgtatcagacatggaaggaatgagacaatgtgcactagttgctaaagaagaagcagaaagattaaatatagaaaagccattagtagttggagtaacagttctaacttcattaagcaaccaagatttacaggacataggatgtaatatgacgacagaagagctagctataaagagagctaaactggcaaaagaatcaggaatagatggggttgtttgttcagcgcaagaagtagataaaatagtagaagcatgtggaactgattttataacagtttgcccaggaataagacctaaatcagcagaggttggggaccaaaaaagagttgtgactccatcagatgcaataaaaagaggtgctcattatttagttgttggaagacctataacaaaagcaaaagatccaagagaatcagctattaatattgtaagagaaatagaaaatgcttag

SEQ ID NO: 156319 - protein, 238 aa, Clostridium difficile QCD-23m63
MINGKEKLIVAIDTDEFDKAKELIDKLEDSVDIFKVGLEQYVATKGKTIDYLKEKGKKIFLDLKFHDIPNTMKSAVRAAVRDNVWLMTIHVSDMEGMRQCALVAKEEAERLNIEKPLVVGVTVLTSLSNQDLQDIGCNMTTEELAIKRAKLAKESGIDGVVCSAQEVDKIVEACGTDFITVCPGIRPKSAEVGDQKRVVTPSDAIKRGAHYLVVGRPITKAKDPRESAINIVREIENA

SEQ ID NO: 156320 - DNA, 738 bp, Salmonella enterica
  subsp. enterica serovar Javiana str. GA_MM04042433
  CDS (1)..(738): transl_table=11
atgacgtttactgcttcatcttcttcccgcgctattactgaatcgcctgtcgttgtggcgttggattaccatgaacgcgataaagccctggcgtttgtcgataaaatcgatcctcgcgattgtcgcttaaaagtgggcaaagagatgttcacgctgtttggtccacagctcgttcgggatctccagcaacgtgggtttgatgtctttcttgatctaaaatttcatgatattcccaacaccacggcccgggcagtcgccgcagcggcagacctgggcgtctggatggtaaacgttcacgcgtctggcggggcgagaatgatggccgcagcgcgcgacgcgctggcgccattcggtaaagatgcgccgttgctcattgccgtgaccgtgttgaccagtatggaaaccagcgatctacacgatatgggcgtgacgttgtcaccggcggaacatgcggagcggctggcgcgcctgacgcagcaatgcgggctggatggcgtggtctgttccgctcaggaagcggtcagatttaaacaggcctttggcgctgcatttaagctggtgacgccgggcattcggcccgcaggcagcgaggcaggcgaccagcgacgcattatgacgcccgaacaggcattatccgccggcgtcgactatatggtgattggccgcccggttacgcaatcggtagatccggcgcaaacgctgaaggatattaacgcgtcactgaaacgggaggcataa

SEQ ID NO: 156321 - protein, 245 aa, Salmonella enterica
  subsp. enterica serovar Javiana str. GA_MM04042433
MTFTASSSSRAITESPVVVALDYHERDKALAFVDKIDPRDCRLKVGKEMFTLFGPQLVRDLQQRGFDVFLDLKFHDIPNTTARAVAAAADLGVWMVNVHASGGARMMAAARDALAPFGKDAPLLIAVTVLTSMETSDLHDMGVTLSPAEHAERLARLTQQCGLDGVVCSAQEAVRFKQAFGAAFKLVTPGIRPAGSEAGDQRRIMTPEQALSAGVDYMVIGRPVTQSVDPAQTLKDINASLKREA

SEQ ID NO: 156322 - DNA, 729 bp, Arthrospira maxima CS-328
  CDS (1)..(729): transl_table=11
atgaccatagataaagttattgttcccctagatgtttccagtcaagctgatgcgatcgcattgattgaaaccctgccacaagtcacattttggaaagtgggtttagaactgtttgtcagttgtggtccgcaaattttaaaacaactcaaacagcgcaataagcggatatttttggatctgaaattccatgatatacccaataccgtagccggagcctgtcgcgccgccgctcgctatggtgtagacttaattactattcacgccaccgctggaaaagtcgccctaaaagctgctcagtcggcggcggaaatgggagcgaatgaggcgggtgtacccgtacctaaattaatcgccattagcctgttaacgagccttaacgccagggaattagcctttgacctcaaaattcccctggaactgccagagtatgccttacagatggcattattagggcaagagtgcggtttagcgggggcggtgtgttcgccgcaggaagtggcacaactacggcggacttgcggggatgattttctgttggtgtgtcctggggtgcgtccgagttgggcatctaaaggtgatcaaaagcgatcgctcactccttcggaagcattgaaagcgggtgctaattatttagtaattggacgacctattactgaagcgaataaccccatgacagcattaaagctaatttcggaagagttagacgcagcggaaaagatagtcaagtag

SEQ ID NO: 156323 - protein, 242 aa, Arthrospira maxima CS-328
MTIDKVIVPLDVSSQADAIALIETLPQVTFWKVGLELFVSCGPQILKQLKQRNKRIFLDLKFHDIPNTVAGACRAAARYGVDLITIHATAGKVALKAAQSAAEMGANEAGVPVPKLIAISLLTSLNARELAFDLKIPLELPEYALQMALLGQECGLAGAVCSPQEVAQLRRTCGDDFLLVCPGVRPSWASKGDQKRSLTPSEALKAGANYLVIGRPITEANNPMTALKLISEELDAAEKIVK

SEQ ID NO: 156324 - DNA, 726 bp, Thioalkalivibrio sp. HL-EbGR7
  CDS (1)..(726): transl_table=11
atgcctgccatatacaacgacccccgtatcattatcgccctggattttccggatgccggccaggccctggaattcaccgcccggctggatcccgctgcctgtcgtctcaaggtaggcttcgaactgttcgtcagtgccggtccggcgctggtggagaagctggtggcagcgggcttcgacgtgttcctggatctcaagtttcacgacattcccaacaccgtcgcctccgcctgccgggcagcagcccagctcggcgtgtggatgatgaacgtgcacgcctccggcggcggccgcatgcttcaggcagcccgggaggccctggacggccagtcccaccgccccaggctcatcgccgtgaccgtgctgacctccatggacgaacgggatctggatgagctggggcttggcaaggacgtgggccggcttgccgaggccctggccgggctcgccgcggccagcggcctggacggggtggtctgctctgccagtgaggcgccgatgctgcgccagcgacacggcgaggatttcctgctggtgaccccgggcatccgtccgcgcagcgcggaacaggatgaccagcgccgggtcatgacaccggccgaggccatccgcgccggatcgagctacctggtggtgggccgtcccatcacccgtgccgattcgcccatggaggtgctggaggccatgaacgcggagatccgcggggcgcatttgcattccgtgtaa

SEQ ID NO: 156325 - protein, 241 aa, Thioalkalivibrio sp. HL-EbGR7
MPAIYNDPRIIIALDFPDAGQALEFTARLDPAACRLKVGFELFVSAGPALVEKLVAAGFDVFLDLKFHDIPNTVASACRAAAQLGVWMMNVHASGGGRMLQAAREALDGQSHRPRLIAVTVLTSMDERDLDELGLGKDVGRLAEALAGLAAASGLDGVVCSASEAPMLRQRHGEDFLLVTPGIRPRSAEQDDQRRVMTPAEAIRAGSSYLVVGRPITRADSPMEVLEAMNAEIRGAHLHSV

SEQ ID NO: 156326 - DNA, 702 bp, cyanobacterium endosymbiont of Rhopalodia gibba
  CDS (1)..(702): transl_table=11
atgtcactggctaatcaggttattgtttccctagatgttcccaatttaactgaggcgatcacgcttttagataagttgcctcaagtcagtttttggaaagtaggactagaattgtttacagctactggaccaaatattctgactattctcaaagaacgaaaaaaacgcatttttctagacctcaaattccatgatattcctaatactgtagcgggagcttgtcgtagtgctagtgaatatggggtggattttcttaccctccatgccacagccggacaaaccgccctacaagcagctacaaaagctattagtaatactgcatttcgtccccaattattagctataactttgctgactagtttaaattcacgagagttagcttttgacctcaaagtttccctagatctaccaaaatatatcctacaaatggctatttttgctcaaaaatttggtgccaatggagcagtgtgttctcctagggaagtgagtcaactacggcagatatgtggggacgattttttgctggtttgtccagggatacgaccaagttggtttgataatggagatcagcgaagggtaatgactccttcggaggcaatgaaagcgggggcagattatttagttattggccgtcctattacaatggcaaatgatccaatagcagcatgggagaaaatttgcgaagaattagaaatggtatga

SEQ ID NO: 156327 - protein, 233 aa, cyanobacterium endosymbiont of Rhopalodia gibba
MSLANQVIVSLDVPNLTEAITLLDKLPQVSFWKVGLELFTATGPNILTILKERKKRIFLDLKFHDIPNTVAGACRSASEYGVDFLTLHATAGQTALQAATKAISNTAFRPQLLAITLLTSLNSRELAFDLKVSLDLPKYILQMAIFAQKFGANGAVCSPREVSQLRQICGDDFLLVCPGIRPSWFDNGDQRRVMTPSEAMKAGADYLVIGRPITMANDPIAAWEKICEELEMV

SEQ ID NO: 156328 - DNA, 708 bp, Magnetospirillum gryphiswaldense
  CDS (1)..(708): transl_table=11
atgcccaatcccgtttacgtcgccctggacaccaccaacgtcaaccaggccgccgatctggccaccaagctgaaaggcctggtcggcggggtcaagctggggctggaattcttcaccgccaacggtcccgccggtatcgaggccatcaccgccttgggcatgccggtgtttttggacctgaaattccacgacatccccaataccgtggccggggccatgcgcggcatcgcgccgttggcgccgcgcttcaccaccattcacgcctcgggcggcttcgccatgatgaaggccgccgccgatgccgccaaggatggcgccgaccgcgccgggcgcccacgcgtcaaggtgctggcggtgtccattctgaccagcatggaccaatcggcgatggaggcggtgggtttccacggcagcgtgctggaacaggtcaagcgtctggccgtgttgggtcaagccgccggtatcgacggcctggtctgttcgccgcatgaggtggaaaccgtacgttccatggtcggcgccggtctggccctggtggtgccgggcatccgtccgtcctgggccgaggctggggatcagaagcgggtgatgacgccgaaagaggcgcgcgaacgcggcgccgacatcctggtcatcggtcgcccgatcaccgccgccgccaatcccgccgatgccgccaagcgcattcttgaggagttggagggttga

SEQ ID NO: 156329 - protein, 235 aa, Magnetospirillum gryphiswaldense
MPNPVYVALDTTNVNQAADLATKLKGLVGGVKLGLEFFTANGPAGIEAITALGMPVFLDLKFHDIPNTVAGAMRGIAPLAPRFTTIHASGGFAMMKAAADAAKDGADRAGRPRVKVLAVSILTSMDQSAMEAVGFHGSVLEQVKRLAVLGQAAGIDGLVCSPHEVETVRSMVGAGLALVVPGIRPSWAEAGDQKRVMTPKEARERGADILVIGRPITAAANPADAAKRILEELEG

SEQ ID NO: 156330 - DNA, 819 bp, Phanerochaete sordida
  CDS (1)..(819)
atggcccacaggcagacttacgcgcagagggccgcaaagcacccgaaccccgccgcgaaggctctcctcgagaccatagagcgcaaaaagacgaatctctgcgtcagcgtcgacgtgaccaagagcgatgacttcctcaaagtcatcgacctcgtcgggccctacgtctgcatggtcaagacccacgtcgacatcatcgaagacttcgcgcccacactcatcgaacgcctgcaggagctgagcgtgaaccacgactttgtgatcttcgaggaccgcaagtttgcggacatcggcaacaccgtcgcgctgcagtatgccgcgggcgtgcacaagatcgcgtcctgggcgcacctcacgaacgcgcaccccgtccccgggccgggcatcgtgagcgggctcgcggccgtcgggcgcccgctcggccgcgggctgctgctgctcgccgagatgagcacgaagggcagcctcgcgaccggcgcgtacaccgaggccgcggtgcgcatggcgcgcgagcaccgcgactttgtcgtcggattcatcgcgcagcgccgcatggagagcgtcgcgacggagagcgtggaccccgaggaggacttcttgatcctcacaccgggcgtcggtctcgacacgaggggcgacggcatgggccagcagtaccgcacgccgaaggaggtcatcaccgaggccggctgcgatgtgatcatcgtcgggagaggcatctatggtaagggcgacaacgtggacgtgcaagctgtccaggcccaagccgagaggtatcgcgctgagggatgggcagcatacctggcgagaatccaatag

SEQ ID NO: 156331 - protein, 272 aa, Phanerochaete sordida
MAHRQTYAQRAAKHPNPAAKALLETIERKKTNLCVSVDVTKSDDFLKVIDLVGPYVCMVKTHVDIIEDFAPTLIERLQELSVNHDFVIFEDRKFADIGNTVALQYAAGVHKIASWAHLTNAHPVPGPGIVSGLAAVGRPLGRGLLLLAEMSTKGSLATGAYTEAAVRMAREHRDFVVGFIAQRRMESVATESVDPEEDFLILTPGVGLDTRGDGMGQQYRTPKEVITEAGCDVIIVGRGIYGKGDNVDVQAVQAQAERYRAEGWAAYLARIQ

SEQ ID NO: 156332 - DNA, 834 bp, Aspergillus fumigatus (strain CEA10 / CBS 144.89 / FGSC A1163)
  CDS (1)..(834)
atgtcctccaagtcgcaattgacctacactgcccgtgccagcaagcatcccaatgctctggcgaagaggctgttcgagattgccgaggccaagaagaccaatgtgactgtctcggctgacgttaccaccactaaggagctactagatcttgctgaccgtctcggtccctacattgccgtgatcaaaacccacatcgatatcctctctgatttcagcaacgagaccattgagggacttaaggctctcgcgcagaagcacaactttctcatcttcgaggaccgcaagttcattgacatcggcaacacggtccagaagcaataccacggcggtaccctccgtatctcggaatgggcccacatcatcaactgcagcattctccctggtgagggtatcgtcgaggctctcgctcagacggcgtctgcaccggacttcgcctacggccccgaacgcggtctgttgatcttggcagagatgacctctaagggctccttggctaccggccagtacactacttcctcggtcgattatgcccggaaatacaagaacttcgttatgggattcgtgtcgacgcgcgcgttgggtgaggtgcagtcggaagtcagctctccttcggatgaggaggactttgtggtcttcacgactggtgtgaacatttcttccaagggagataagcttggtcagcagtaccagacgcccggatcggctatcggccggggtgctgacttcattatcgcgggtcgcggtatctacgccgcgccggatccggtgcaggctgcgcaacagtatcagaaggaggggtgggaagcctacctggcccgtgtcggcggaaactaa

SEQ ID NO: 156333 - protein, 277 aa, Aspergillus fumigatus (strain CEA10 / CBS 144.89 / FGSC A1163)
MSSKSQLTYTARASKHPNALAKRLFEIAEAKKTNVTVSADVTTTKELLDLADRLGPYIAVIKTHIDILSDFSNETIEGLKALAQKHNFLIFEDRKFIDIGNTVQKQYHGGTLRISEWAHIINCSILPGEGIVEALAQTASAPDFAYGPERGLLILAEMTSKGSLATGQYTTSSVDYARKYKNFVMGFVSTRALGEVQSEVSSPSDEEDFVVFTTGVNISSKGDKLGQQYQTPGSAIGRGADFIIAGRGIYAAPDPVQAAQQYQKEGWEAYLARVGGN

SEQ ID NO: 156334 - DNA, 831 bp, Penicillium camembertii
  CDS (1)..(831)
atgtcgtccaagtcgcaattgacctatagcgctcgcgctcaatcgcaccccaatcctcttgcgcgcaagcttttccaagtcgccgaagaaaagaagagcaatgtcaccgtctccgctgacgtgaccacgacaaaagagctcctggacctcgccgaccgccttggcccctacatcgccgtgatcaaaacccacatcgacatcctctccgacttcagccaagaaacaatcgacggcctgaacgccctagcccaaaagcacaacttcctcatcttcgaagaccgcaaattcatcgacatcggcaacacagtccagaaacagtaccacaacggcaccctccgcatctccgaatgggcccacataatcaactgctccgtccttcccggcgagggcatcgtcgaggccctcgcacaaaccgcccaggccactgacttcccctacggctccgagcgcggcctcctcatcctcgccgagatgacctccaagggatccctcgcaacaggctcctacacctctgcctccgtcgacatcacgcgcaagtaccccagctttgttctgggctttgtctcgacccgctcgttgggcgaggttgagtctaccgaggcgcccgcccagggcgaggacttcgttgtcttcaccactggcgtcaacctctcgtctaagggcgataagctcggtcagcagtaccagacgccgcagtcggctattggccgcggtgccgacttcattatctctggtcgtggtatctatgccgctgcagaccctgttgaggctgctaagcagtaccagcagcagggatgggaggcgtatctggcccgcgtgggcgcgcaatag

SEQ ID NO: 156335 - protein, 276 aa, Penicillium camembertii
MSSKSQLTYSARAQSHPNPLARKLFQVAEEKKSNVTVSADVTTTKELLDLADRLGPYIAVIKTHIDILSDFSQETIDGLNALAQKHNFLIFEDRKFIDIGNTVQKQYHNGTLRISEWAHIINCSVLPGEGIVEALAQTAQATDFPYGSERGLLILAEMTSKGSLATGSYTSASVDITRKYPSFVLGFVSTRSLGEVESTEAPAQGEDFVVFTTGVNLSSKGDKLGQQYQTPQSAIGRGADFIISGRGIYAAADPVEAAKQYQQQGWEAYLARVGAQ

SEQ ID NO: 156336 - DNA, 834 bp, Aspergillus parasiticus
  CDS (1)..(834)
atgtcttccaagtcgcaattgacctacagtgcacgcgctagcaagcaccccaatgccctcgtaaagaagctctttgaggttgccgaggccaagaaaaccaatgtcaccgtttcggccgacgtgacaaccaccaaagagctgctggatttggctgaccgactcggtccgtacattgccgtgatcaaaactcacatcgatatcctctccgatttcagcgaagagaccatcaccggtctgaaggcccttgcagagaagcacaatttcctcatcttcgaagatcgcaagttcatcgatatcggaaacacagtccaaaagcagtaccatggcggcactctgcgcatctccgagtgggcccacatcatcaactgcagtattctgcccggtgagggtatcgtcgaggctctagcccagactgcttcggccgaggactttccctacggctctgagaggggccttttgatccttgcggagatgacatccaagggatctttggctaccggtcaatatactacttcttctgttgactatgctcggaagtataagaagtttgtgatgggattcgtctcgacgcgtcacctgggcgaggttcagtctgaagttagctctccttcggaggaggaggatttcgtcgtgttcacgacaggtgtcaacctctcctcgaagggagacaagctgggacagcaataccagactcctgaatctgctgttggacgcggtgccgactttatcattgctggtcgtggaatttatgctgctcctgatcccgtggaggcggcgaagcggtaccagaaagagggatgggatgcatacctgaagcgtgttggtgcgcaataa

SEQ ID NO: 156337 - protein, 277 aa, Aspergillus parasiticus
MSSKSQLTYSARASKHPNALVKKLFEVAEAKKTNVTVSADVTTTKELLDLADRLGPYIAVIKTHIDILSDFSEETITGLKALAEKHNFLIFEDRKFIDIGNTVQKQYHGGTLRISEWAHIINCSILPGEGIVEALAQTASAEDFPYGSERGLLILAEMTSKGSLATGQYTTSSVDYARKYKKFVMGFVSTRHLGEVQSEVSSPSEEEDFVVFTTGVNLSSKGDKLGQQYQTPESAVGRGADFIIAGRGIYAAPDPVEAAKRYQKEGWDAYLKRVGAQ

SEQ ID NO: 156338 - DNA, 735 bp, Microcoleus chthonoplastes PCC 7420
  CDS (1)..(735): transl_table=11
atggctacttataaacaagcattttccatgtcagtagcagagcggattatagtccccttagatgtaccaaccgaagcccaagcgatcgccctcgtggaacaattaccgcaggtgaggttctggaaagtcggactggagctatttgtcagtagtggatctgcaattcttcagattctcaaacagcggcaaaaacggatatttttagatctcaagtttcacgatattcccaatacggtagctggggcaacacgggcggctgctggatacggggtagatttattgacaattcatgccgtagccgggcgcatggcactcaaagtagcggtagcagcagcgaagcaaggagcagaagccgccgcctgttcacccccaaagttaattgcgatttccctactcaccagtttgaactcacgagatttagcctttgatttaaaagttccgattgagttacccgaatacgccctacagatggcacttttggcacaagaaaccggattaaatggtgcagtttgttcacctcaagaagtgtctcagcttcgccaagtgtgtggggatgactttctcctcgtttgtcccggcgtccgtccaagttggtcggaacaggacgatcaacggcgatcgatgacgccagcagatgctctgaaagcgggggctgattacctggtgattggacgcccgatcacggctgcgcctgaccccgttgcagcgtgggaaagaatttgtgaggagttatag

SEQ ID NO: 156339 - protein, 244 aa, Microcoleus chthonoplastes PCC 7420
MATYKQAFSMSVAERIIVPLDVPTEAQAIALVEQLPQVRFWKVGLELFVSSGSAILQILKQRQKRIFLDLKFHDIPNTVAGATRAAAGYGVDLLTIHAVAGRMALKVAVAAAKQGAEAAACSPPKLIAISLLTSLNSRDLAFDLKVPIELPEYALQMALLAQETGLNGAVCSPQEVSQLRQVCGDDFLLVCPGVRPSWSEQDDQRRSMTPADALKAGADYLVIGRPITAAPDPVAAWERICEEL

SEQ ID NO: 156340 - DNA, 831 bp, Penicillium marneffei (strain ATCC 18224 / CBS 334.59 / QM 7333)
  CDS (1)..(831)
atgtcgtcctcctccaaacaaccctacagcgtccgcgcaaagaaccatcccaaccccctcgtgcgcaaactattcgctactgccgaagccaaaaagacaaacgtgaccgtctcagcagatgtgaccactacaaaacaactccttgatctcgccgaccaactcggcccttatatcgccgtcttcaaaacccatatcgacatcctctccgacttcagcaccgaaacgacgaccggcctcaaagcaatcgccgaaaaacacaacttccttattttcgaagaccgcaagttcattgatatcggcaatacagtccagaaacaataccatggcggcgcactacgaatctctgaatgggcccacatcatcaattgcgccatcctacccggcgaagggatcgtgcaggcattgactcagaccgcaaaggccgatgactttccatacggtgaggataagggactactcattctcgccgaaatgacttccaagggctccctagcgacgggcacatataccacgcgctcggtggattatgcgcgacggtacaaggagtttgtcatgggatttgtatgcaatcgctcactcaccgatgagcagtccacggagaccactgcgacggccgacgaggatttcgtggtgtttaccacaggagtcaacttggcctcaacgggcgatgcgttgggtcaacagtaccaaacaccgcagagcgcggtggctagaggggccgatttcatcattgccggaagaggcatatatgctgcgcctgatcccgtggaggccgttaagcagtatcgggagcaggggtggaaggcttatcttgagagagtcggacaatag

SEQ ID NO: 156341 - protein, 276 aa, Penicillium marneffei (strain ATCC 18224 / CBS 334.59 / QM 7333)
MSSSSKQPYSVRAKNHPNPLVRKLFATAEAKKTNVTVSADVTTTKQLLDLADQLGPYIAVFKTHIDILSDFSTETTTGLKAIAEKHNFLIFEDRKFIDIGNTVQKQYHGGALRISEWAHIINCAILPGEGIVQALTQTAKADDFPYGEDKGLLILAEMTSKGSLATGTYTTRSVDYARRYKEFVMGFVCNRSLTDEQSTETTATADEDFVVFTTGVNLASTGDALGQQYQTPQSAVARGADFIIAGRGIYAAPDPVEAVKQYREQGWKAYLERVGQ

SEQ ID NO: 156342 - DNA, 717 bp, Pseudovibrio sp. JE062
  CDS (1)..(717): transl_table=11
atgtcttatcgcccagcaaatgcagtcgatcgcctgatcctccctctggatgttccaacagttgatgaagcgcgtgagctcgtcaagaagacacaagggcttgtcggcacttacaaaatcggcatgcagctccagtttgcaggtggcctgcagttcgcggaagagctggccaaagaaggacactccatctttcttgatgtaaagctgctggatatcgacaacaccatcaccagcgcagtgaaaaacgtcgcaaaaatgggcatgaagttcatgaccatccatgcgtacccgaaaaacatgcgtgcagcggtgaaggcactggaagaagttggcaacaaagacctctgcctgctgggtgtcaccgtcctcacgtccatggacgagcaggacgtaaaagacgctggctatgtcggcccaactgcaaaccttgtcgaacagcgcgcgcttgatgcagttgaagctggcgttggcggtattgtctgctctccggtggaatctgctgcaatgcgtgcaaaggttggcgacaagctttgcatcgtgacgccgggtgtccgtccgaaaggctccgatgctggcgaccagcgccgcatcatgaccccatacgatgccatcaaagcagggtccgactacctcgtcatcggccgcccaatctaccgtgcagaagacccccgcgccgcagccgaagctgtagtcgctgaaatcgagagcgctttgtag

SEQ ID NO: 156343 - protein, 238 aa, Pseudovibrio sp. JE062
MSYRPANAVDRLILPLDVPTVDEARELVKKTQGLVGTYKIGMQLQFAGGLQFAEELAKEGHSIFLDVKLLDIDNTITSAVKNVAKMGMKFMTIHAYPKNMRAAVKALEEVGNKDLCLLGVTVLTSMDEQDVKDAGYVGPTANLVEQRALDAVEAGVGGIVCSPVESAAMRAKVGDKLCIVTPGVRPKGSDAGDQRRIMTPYDAIKAGSDYLVIGRPIYRAEDPRAAAEAVVAEIESAL

SEQ ID NO: 156344 - DNA, 693 bp, Desulfovibrio piger ATCC 29098
  CDS (1)..(693): transl_table=11
atggctgcccaactcattgtcgctctggatctgccccgcaaggaagacgctctcgtcctggcccgcgaactgcaaggcgccgtgccctggtgcaaggtgggcatggaactgttcaccctggccggcccggacatcatccgcgaactgcacgacctcggcttccatgtcttcctggacatgaaattctacgacatcccccacaccgtggcccaggccgtcaaggccgctgccgccgccggtgcggaactgctgaccctgcactgccagggcggcgagcgcatgtgcagcgaggcccgtatcgccgccgacagctacggcagcaaggctccccagcttttcggcgtcacggccctgaccagcttcggccccggcgagatgcccggcatcagcgccgatccctcggactttgccctggagctggccggcaaggcccgcggctggggtctggacggcgtggtctgctccggccatgaggccgcccgcatcaaggcctcctgtcagggcctgcgctgcctgtgccccggcatccgtcccgcgggcgccgataccgacgaccagcagcgcatcatgacgcccgcccgtgccgtgcaggccggtgccgacttcctggtggtgggacgtcccatcctcaaggccccttcgcccgccgaggccgcccgtgccatccaggccgagatgaaagccgccgtctaa

SEQ ID NO: 156345 - protein, 230 aa, Desulfovibrio piger ATCC 29098
MAAQLIVALDLPRKEDALVLARELQGAVPWCKVGMELFTLAGPDIIRELHDLGFHVFLDMKFYDIPHTVAQAVKAAAAAGAELLTLHCQGGERMCSEARIAADSYGSKAPQLFGVTALTSFGPGEMPGISADPSDFALELAGKARGWGLDGVVCSGHEAARIKASCQGLRCLCPGIRPAGADTDDQQRIMTPARAVQAGADFLVVGRPILKAPSPAEAARAIQAEMKAAV

SEQ ID NO: 156346 - DNA, 795 bp, Providencia rustigianii DSM 4541
  CDS (1)..(795): transl_table=11
atggccagtgacaacgtcacttttttaattacgttaacactcaataaaggctatagaatgatttcctcaactgagaacctcactcgcgttacgactcactcgccaatcattgtggctcttgattatgaagatgctaatgcggcgttagcgtttgtcgataagattgacccgcgcgattgccgcttaaaggtgggtaaagaaatgttcacttttaatggtcctcaatttgttaagtcactccatgatcgcggttttgacgtttttcttgatctgaaattccatgatattcctaatacggttgctcgtgcggtctctgcggctgctgagatgggcgtttggatggtgaatgttcatgcgagtggtggcgctcgtatgatggaagctgctcgtcaagcgctcgaagtttatgggaaagatgcccctttattaacagcagtgaccgttctcaccagtatggatgcctctgatttagcaggtatcggaatcaacttaacgccagcggaatatgcagaacatttagcattactcactaagcagtgtggcttagatggtgtggtgtgttctgctcacgaagcgaaagcattgaaagagttatgtgggcacgattttaaattagtgaccccaggaatacgccctgtgggaagcgaagtcggtgaccagcgtcgtattatgacgccacagcaggctattgaagcgggtgtggattatatggtcattgggcgaccaattactcgcagtgacgatcctgcgctaaccttgcaacaaattaaccagtcaatcagagaattagtatga

SEQ ID NO: 156347 - protein, 264 aa, Providencia rustigianii DSM 4541
MASDNVTFLITLTLNKGYRMISSTENLTRVTTHSPIIVALDYEDANAALAFVDKIDPRDCRLKVGKEMFTFNGPQFVKSLHDRGFDVFLDLKFHDIPNTVARAVSAAAEMGVWMVNVHASGGARMMEAARQALEVYGKDAPLLTAVTVLTSMDASDLAGIGINLTPAEYAEHLALLTKQCGLDGVVCSAHEAKALKELCGHDFKLVTPGIRPVGSEVGDQRRIMTPQQAIEAGVDYMVIGRPITRSDDPALTLQQINQSIRELV

SEQ ID NO: 156348 - DNA, 738 bp, Providencia alcalifaciens DSM 30120
  CDS (1)..(738): transl_table=11
atgaactcctcaactgagaacctcgttcgcgttaacactgactcgcctatcattgtcgctctggattatgaaaattctgatgcagcgctcgcatttgttgataggattgatccgcgcgattgtcgcttaaaagtgggcaaagagatgttcacatttaatggtcctcaatttgtaaagtcactccatgaccgtggttttgatgtttttctggatcttaaattccacgatattcccaataccgtcgctcgagcggtttcagcggcagcagaaatgggtgtctggatggttaacgtccatgccagcggtggcgctcgtatgatggaagccgctcgtcaagcccttgagagctatggcaaagacgcacctttacttacagccgtaacagtattaaccagtatggatgcttctgatcttgctggcgttggaattaacttaacccccgcagaacatgcagaacgtttagcactcctgaccaagcagtgtggtcttgatggtgtagtctgttcggcacatgaagccaaagcactgaaagcagtgtgcggtcaagaattcaagctggtgactccaggtattcgccctgttgggagtgatgtgggagatcagcgccgtattatgacgcctcaacaggcgctcgaggcgggtgtggactacatggtaataggacgcccaatcactcggagtgacgatcctgcactgactttaaaacagatcaaccaatcaatcagggatatcgcatga

SEQ ID NO: 156349 - protein, 245 aa, Providencia alcalifaciens DSM 30120
MNSSTENLVRVNTDSPIIVALDYENSDAALAFVDRIDPRDCRLKVGKEMFTFNGPQFVKSLHDRGFDVFLDLKFHDIPNTVARAVSAAAEMGVWMVNVHASGGARMMEAARQALESYGKDAPLLTAVTVLTSMDASDLAGVGINLTPAEHAERLALLTKQCGLDGVVCSAHEAKALKAVCGQEFKLVTPGIRPVGSDVGDQRRIMTPQQALEAGVDYMVIGRPITRSDDPALTLKQINQSIRDIA

SEQ ID NO: 156350 - DNA, 831 bp, Talaromyces stipitatus
  strain ATCC 10500 / CBS 375.48 / QM 6759 / NRRL 1006
  CDS (1)..(831)
atgtcatcctcctccaaactaccatacggcgtccgcgcaaagaaccatcctaacattctcgtgcgtaaactgttcgcaatcgccgaagccaaaaagaccaatgtgaccgtctcagcagacgtaacaaccacaaaagaacttctcgatctcgcagaccaactcggcccctacatcgccgtcctcaaaacccacatcgacatcctctccgactttagccccgaaactacaaccggactaaaacaccttgcgcaaaaacacaacttcctcatcttcgaagaccggaaattcatcgacatcggcaacacagttcaaaaacaataccacggcggcgcactacgaatctcggaatggtcacacattataaactgtgccatcttacccggtgaagggattgtgcaagctctaacccaaaccgcgacggcggatgatttcccttacggtaatgagcggggtttactcattcttgctgaaatgacgtccaagggatccctagctaaaggggaatatactacgcgttcagtggattatgcgcgacgatataagaaattcgttatggggtttgtgtgtaatcgtgcattgaccgaggaacaatcgaccgaaacatcaaagagcgaagatgaggattttgtggttttcactacgggagtaaatctggcttccgcgggcgatgcgttgggtcaacaatatcaaacgccgcagtcggcggtggctcgaggcgcggattttatcatttcgggtagagggatatacgctgctcctgatccggtggaggctgttaaacggtatcaggagcaaggatggaacgcctatcttgagcgagtgggtttgtga

SEQ ID NO: 156351 - protein, 276 aa, Talaromyces stipitatus
  strain ATCC 10500 / CBS 375.48 / QM 6759 / NRRL 1006
MSSSSKLPYGVRAKNHPNILVRKLFAIAEAKKTNVTVSADVTTTKELLDLADQLGPYIAVLKTHIDILSDFSPETTTGLKHLAQKHNFLIFEDRKFIDIGNTVQKQYHGGALRISEWSHIINCAILPGEGIVQALTQTATADDFPYGNERGLLILAEMTSKGSLAKGEYTTRSVDYARRYKKFVMGFVCNRALTEEQSTETSKSEDEDFVVFTTGVNLASAGDALGQQYQTPQSAVARGADFIISGRGIYAAPDPVEAVKRYQEQGWNAYLERVGL

SEQ ID NO: 156352 - DNA, 699 bp, Nocardia farcinica
  CDS (1)..(699): transl_table=11
atgcccaccaccacgaccgtcagaggccggctggctatcgcgctcgacaccagcgatctggacaccgcggtgtcgatcgcgaaggccgtgcagcccgacatcggcgtcgccaaagtcggccttcaactgttcagcgcggcggggcgcgacgccgtgcgcgctatgcaggatctcggcatggacgtcttcctcgacgtcaagctgcacgacatccccaacaccgtctacggggccagcaccgtcctcggagccctgggcgtccaatacctgaccgtccacgcaggcggtggaacggccatgctcgaagctgcggtgaggggactcggcgagggcgcgagcagcgccgggttcgcagccccgaccgtgctggcggtcaccgtgctgaccagcgcgccggacgcatcgccggaacttctcaacgaacgcctggcggcggctgtcgccgccgattgtggcggcgttgtctgcgcggccagcgacctgcccgtcattcgcgccgctgcgcccgacatcctgaccgtggttcccggcatccgtccggccggcggcgaggtgcacgaccagcagcgtgtggcgacccctgccgatgccattcgcagtggtgcaagcattctcgtcctcggtcgagcgatcaccgctgctccggaccccgccgaagccgcgcgggccatcaccgaggaagtcgcgcaagcactttga

SEQ ID NO: 156353 - protein, 232 aa, Nocardia farcinica
MPTTTTVRGRLAIALDTSDLDTAVSIAKAVQPDIGVAKVGLQLFSAAGRDAVRAMQDLGMDVFLDVKLHDIPNTVYGASTVLGALGVQYLTVHAGGGTAMLEAAVRGLGEGASSAGFAAPTVLAVTVLTSAPDASPELLNERLAAAVAADCGGVVCAASDLPVIRAAAPDILTVVPGIRPAGGEVHDQQRVATPADAIRSGASILVLGRAITAAPDPAEAARAITEEVAQAL

SEQ ID NO: 156354 - DNA, 789 bp, Mortierella alpina
  CDS (1)..(789)
atgtccgcctcaaagtcatacctcgagcgctcgaagctccactccaaccctacagccaaggccttcttggagctcatggagcgcaagaagtccaacctgtcggtggctgctgatctcacctccaaggctgcattgattgaattggccgacaaagtcgggccttacatttgtctgctcaagactcacatcgatgttgttgacgatttcgatcaggatttggtggatcagctcacggcgttggctaagaagcacgactttatgatctttgaggaccgcaagtttgctgatatcggcaacacggtcaagcttcagtacagctcgggagtgtacaagattgcctcttggtccgatattaccaatgcgcacactgttcctggcgagggcatcatccagggacttcgcgaggttggattgcccctgaaccgctgcttgctcctgttggcagagatgtcgtctgcaggaacattggctaagggcgactacaccacgacgacggttgagctggcgcgcaagtacaaggattttgtggttggattcattgccatgtcaagatatgaggacaaggagggcgacgactttatctacatgacacccggcgttggactggaccagacctcggatgggttgggtcagcagtggaagcacccacgggaggttgtttatgatcgcggatgcgatgtcatcattgttggacgtggcatctacgggaagggcagagaccccgccaaggaggccaagcggtatcaggaggctggctggaacgcctatttggagaggatctccaagtaa

SEQ ID NO: 156355 - protein, 262 aa, Mortierella alpina
MSASKSYLERSKLHSNPTAKAFLELMERKKSNLSVAADLTSKAALIELADKVGPYICLLKTHIDVVDDFDQDLVDQLTALAKKHDFMIFEDRKFADIGNTVKLQYSSGVYKIASWSDITNAHTVPGEGIIQGLREVGLPLNRCLLLLAEMSSAGTLAKGDYTTTTVELARKYKDFVVGFIAMSRYEDKEGDDFIYMTPGVGLDQTSDGLGQQWKHPREVVYDRGCDVIIVGRGIYGKGRDPAKEAKRYQEAGWNAYLERISK

SEQ ID NO: 156356 - DNA, 810 bp, Asterotremella humicola
  CDS (1)..(810)
atggccccgcaccccgtcaccaccaagacgtacgcctcgcgcgcggcgtcgcaccccaaccccaccgcccgccgcgtcctcgagacgatggagcgcaaaaagacaaacctctgcgtgtcggtcgacgtgacaaagtcggccgagatcctcgacattgtccgccaggtcgcgccctacgtctgcatggtcaagacccacatcgacattgtcgaggacttcaccatcgacctcgccaacgagctcaagcgcctcgccgacgagctcgactttgtcattttcgaggaccgcaagtttgccgacattggcaacacggtcgagcttcagtacagcgccggtgtgcacaagatcgcctcgtggtctcacctcaccaacgcccacgtcgtccccggccccggcatcatcaccggcctcggagccgtcggcaagccgctcggcaacgccctcatcctgctcgccgagatgagctcggccggcaacctcgccagcggcgagtacactgagaaggccgtccagatggcccgtgaggccggccttgactgggtcgtcggctttatcgccatgcaccgtgtcgacaaggccgacgaccccgacttcctcgtcatcactcccggtgtcggtctcgacgtcaagggcgacggccgtggccagcagtaccgtaccccgcacgaggtcgtctacgactcgggctgcgatgtcatcatcgtcggccgcggcatctacaagaacaaggatgccgtcgcgtccgaggccaagaggtatcaggaggccggatggaaggcctacgaggaccgcctgcagcgtactgcttag

SEQ ID NO: 156357 - protein, 269 aa, Asterotremella humicola
MAPHPVTTKTYASRAASHPNPTARRVLETMERKKTNLCVSVDVTKSAEILDIVRQVAPYVCMVKTHIDIVEDFTIDLANELKRLADELDFVIFEDRKFADIGNTVELQYSAGVHKIASWSHLTNAHVVPGPGIITGLGAVGKPLGNALILLAEMSSAGNLASGEYTEKAVQMAREAGLDWVVGFIAMHRVDKADDPDFLVITPGVGLDVKGDGRGQQYRTPHEVVYDSGCDVIIVGRGIYKNKDAVASEAKRYQEAGWKAYEDRLQRTA

SEQ ID NO: 156358 - DNA, 921 bp, Oryza sativa subsp. japonica
  CDS (1)..(921)
atgacgctcacggaggtgctcgccgtcctcgtgaagcgcgggaagctgggcgaggagaaggcccaggaggtgaagcgattcctcgacgcaaacaggaagatggctgtgccgggactgccggttaaaccgaaagtagttaggaaggcattttctgagagagctggattggcgacgaatccgatggggaggaagctgttcgagttgatggaggccaagcaaagcaacttgtgtgttgctgcagatgtcgggacagcaacagagctacttgatctcgccgataagattggtccagagatctgcatgttgaaaactcatgtggatatcttgtctgattttacaccggattttggccacaagctccgttcgattgctgagaggcacagctttttgatatttgaagaccgcaagtttgcagacattggaaacacagtaactatgcaatatgaaggaggaatattccgcatattagactgggctgatattgttaatgcacatatagtttctggacctggaattgtagaaggcttgaagctgaagggtctgccaaaaggaagagggttacttttgctttctgaaatgagttcagctggcaaccttgctcatggagattacactgctgcagccgtgaagattgctgagcaacattctgatattgtaattggatttatatcagtaaatcctgcatcttggtcagtgacgccgtcaagtccagcgttcatccatgctactcctggagttcagttggttgctgggggagactcgcttggtcaacagtacaacactccttactctgtcataaacgacagaggcagcgacataattatagtcggtcgtgggattataagggcgaacaatcctgctgagaccgcgagagagtaccgcatccaaggatggcatgcttaccaatccagcttatcatga

SEQ ID NO: 156359 - protein, 306 aa, Oryza sativa subsp. japonica
MTLTEVLAVLVKRGKLGEEKAQEVKRFLDANRKMAVPGLPVKPKVVRKAFSERAGLATNPMGRKLFELMEAKQSNLCVAADVGTATELLDLADKIGPEICMLKTHVDILSDFTPDFGHKLRSIAERHSFLIFEDRKFADIGNTVTMQYEGGIFRILDWADIVNAHIVSGPGIVEGLKLKGLPKGRGLLLLSEMSSAGNLAHGDYTAAAVKIAEQHSDIVIGFISVNPASWSVTPSSPAFIHATPGVQLVAGGDSLGQQYNTPYSVINDRGSDIIIVGRGIIRANNPAETAREYRIQGWHAYQSSLS

SEQ ID NO: 156360 - DNA, 834 bp, Aspergillus awamori
  CDS (1)..(834)
atgtcctccaagtcgcaattgacctacactgcccgtgccagcaagcaccccaatgctctggccaagaggctgttcgaaattgctgaggccaagaagaccaatgtgaccgtctcggctgacgttaccaccactaaggagctactagatcttgctgaccgtctcggtccctacatcgccgtgatcaaaacccacatcgatattctctctgacttcagcgacgagactattgagggcctcaaggctcttgcgcagaagcacaacttcctcatcttcgaggaccgcaaattcattgacatcggcaacactgtccagaagcaataccaccgtggtacccttcgcatctcggaatgggcccacatcatcaactgcagcatcctacctggtgagggtatcgtcgaggctctcgctcagacggcgtctgcaccggacttcggctacggtcccgaacgtggtctgttgatcttggcggaaatgacctctaagggttccttggccaccggccagtacactacttcttcggttgattatgcccggaaatacaagaacttcgtcatgggatttgtgtcgacccgctcgttgggtgaggtgcagtcggaagtcagctctccttcggatgaggaggactttgtggtcttcacgactggtgtgaacatttcgtccaagggagataagctcggtcagcagtaccagacgcccgcatcggctatcggtcggggtgctgacttcattatcgcgggtcgcggtatctacgccgcgccggacccggtgcaggctgcgcaacagtaccagaaggaaggttgggaggcgtacctggcccgtgtcggcggaaactaa

SEQ ID NO: 156361 - protein, 277 aa, Aspergillus awamori
MSSKSQLTYTARASKHPNALAKRLFEIAEAKKTNVTVSADVTTTKELLDLADRLGPYIAVIKTHIDILSDFSDETIEGLKALAQKHNFLIFEDRKFIDIGNTVQKQYHRGTLRISEWAHIINCSILPGEGIVEALAQTASAPDFGYGPERGLLILAEMTSKGSLATGQYTTSSVDYARKYKNFVMGFVSTRSLGEVQSEVSSPSDEEDFVVFTTGVNISSKGDKLGQQYQTPASAIGRGADFIIAGRGIYAAPDPVQAAQQYQKEGWEAYLARVGGN

SEQ ID NO: 156362 - DNA, 834 bp, Aspergillus niger
  CDS (1)..(834)
atgtcctccaagtcgcaattgacctacactgcccgtgccagcaagcaccccaatgctctggccaagcggctgttcgaaattgctgaggccaagaagaccaatgtgaccgtctctgccgacgttaccaccactaaggagctactagatcttgctgaccgtctcggtccctacatcgccgtgatcaaaacccacatcgatatcctctctgacttcagcgacgagaccattgagggcctcaaggctcttgcgcagaagcacaacttcctcatcttcgaggaccgcaaattcatcgacattggcaacactgtccagaagcaataccaccgtggtaccctccgcatctcagaatgggcccatatcatcaactgcagcatcctgcctggcgagggtatcgtcgaggctctcgctcagacggcgtctgcaccggacttctcctacggccccgaacgtggtctgttgatcttggcggaaatgacctctaagggttccttggccaccggccagtacactacttcttcggttgattatgcccggaaatacaagaacttcgtcatgggatttgtgtcgacccgctcgttgggtgaggtgcagtcggaagtcagctctccttcggatgaggaggactttgtggtcttcacgactggtgtgaacatttcgtccaagggagataagctcggtcagcagtaccagactcccgcatcggctatcggtcggggtgctgacttcattatcgcgggtcgcggtatctacgccgcgccggacccggtgcaggctgcgcaacagtaccagaaggaaggttgggaggcgtacctggcccgtgtcggcggaaactaa

SEQ ID NO: 156363 - protein, 277 aa, Aspergillus niger
MSSKSQLTYTARASKHPNALAKRLFEIAEAKKTNVTVSADVTTTKELLDLADRLGPYIAVIKTHIDILSDFSDETIEGLKALAQKHNFLIFEDRKFIDIGNTVQKQYHRGTLRISEWAHIINCSILPGEGIVEALAQTASAPDFSYGPERGLLILAEMTSKGSLATGQYTTSSVDYARKYKNFVMGFVSTRSLGEVQSEVSSPSDEEDFVVFTTGVNISSKGDKLGQQYQTPASAIGRGADFIIAGRGIYAAPDPVQAAQQYQKEGWEAYLARVGGN

SEQ ID NO: 156364 - DNA, 717 bp, Bacillus anthracis
  CDS (1)..(717): transl_table=11
atgtcacagtcgttaatcgttgcactagatttcccagggaaacaagatgtagaacaattcttgcgccactttgaaggggaagagttatttgtcaaagttggtatggagttattttacaaagaaggccctgcgattattacgtacttaaaagaaaaaggacataaaatctttctagatttaaaacttcatgatattccgaatacagtaaaaagcgctatgcgtagcctagctagtctagatgtagatatggtaaatgttcatgctggtgggggaagcagtatgatgaaagctgcgattgagggattagaggaaggtaagcaagaaggaaaagagagaccgatttgtattgcagttacacaactaacaagcacttcggaaactatgatgaaaaaagagattggcattgagaaaacgttagaagaagcggttgctcattatgcaaaactaacgaaagaaagtggacttgatggcgttgtttgctcaacacttgaagttccaaaattacgtgaagtatgcggaagtgaatttgtaacagtaacaccggggattcgtcttgcaagcgatgatgtaaatgaccaggtgcgcgtagcaacaccgaaacgtgcgagggaacttggctcaagctatatcgtagttggacgtagtattacaaaagcagaaaatccgcttgaagcgtataaaacagtaaaacaacagtgggaaggtgtaacagtatga

SEQ ID NO: 156365 - protein, 238 aa, Bacillus anthracis
MSQSLIVALDFPGKQDVEQFLRHFEGEELFVKVGMELFYKEGPAIITYLKEKGHKIFLDLKLHDIPNTVKSAMRSLASLDVDMVNVHAGGGSSMMKAAIEGLEEGKQEGKERPICIAVTQLTSTSETMMKKEIGIEKTLEEAVAHYAKLTKESGLDGVVCSTLEVPKLREVCGSEFVTVTPGIRLASDDVNDQVRVATPKRARELGSSYIVVGRSITKAENPLEAYKTVKQQWEGVTV

SEQ ID NO: 156366 - DNA, 717 bp, Bacillus thuringiensis subsp. konkukian
  CDS (1)..(717): transl_table=11
atgtcacagtcgttaatcgttgcactagattttccggggaaacaagatgtagaacaattcttgcgccactttgaaggggaagagttatttgtcaaagttggtatggagttattttacaaagaaggccctgcgattattacgtacttaaaagaaaaagggcataagatctttctagatttaaaacttcatgatattccaaatacggtaaaaagcgctatgcgtagcctagctagtctagatgttgatatggtaaatgttcatgctgctgggggaagcagcatgatgaaagctgcgattgagggattagaggaaggtaagcaagaaggaaaagagagaccgatttgtattgcagttacacaactaacaagcacttcggaaactatgatgaaaaaagagattggcattgagaaaacgttagaagaagcggttgctcattatgcaaaattaacgaaagaaagtggactggatggcgttgtttgttcaacgcttgaagttccaaaattacgtgaagtatgcggaaatgaatttgtaacagtaacaccggggattcgtcttgcaagcgatgatgtaaatgaccaggtgcgcgtagcaacaccgaaacgtgcgagggaacttggctcaagctatatcgtagttggacgtagtattacaaaagcagaaaatccgcttgaagcgtataaaacagtaaaacaacagtgggaaggtgtaacagtatga

SEQ ID NO: 156367 - protein, 238 aa, Bacillus thuringiensis subsp. konkukian
MSQSLIVALDFPGKQDVEQFLRHFEGEELFVKVGMELFYKEGPAIITYLKEKGHKIFLDLKLHDIPNTVKSAMRSLASLDVDMVNVHAAGGSSMMKAAIEGLEEGKQEGKERPICIAVTQLTSTSETMMKKEIGIEKTLEEAVAHYAKLTKESGLDGVVCSTLEVPKLREVCGNEFVTVTPGIRLASDDVNDQVRVATPKRARELGSSYIVVGRSITKAENPLEAYKTVKQQWEGVTV

SEQ ID NO: 156368 - DNA, 720 bp, Bacillus subtilis
  CDS (1)..(720): transl_table=11
atgaaaaacaacctgcccatcatcgcgcttgattttgcgtcagctgaagaaacacttgcgttcttagcgccttttcagcaagaaccgttatttgtaaaggttgggatggagcttttttatcaagaagggccatctatcgtgaaacaactaaaagaaagaaactgcgagctatttttagatctaaagcttcatgacatcccgactactgtaaacaaagcgatgaagcgccttgccagtcttggagtagacctcgtcaatgttcatgctgccgggggcaaaaaaatgatgcaggcagctctcgaaggcttagaagaaggtacgccggctggaaaaaaacgtccgtcacttatcgcggtaacccagctgacaagcacatctgaacaaatcatgaaagatgaactgctgatcgaaaagtctctgattgatacggttgtgcactacagcaaacaggcggaagaaagcggactggatggagtggtctgctctgttcatgaagcaaaagccatttaccaagcggtgtcgccttcatttctgactgtcactccggggatcagaatgtcagaggacgctgcgaatgaccaagttcgcgtagcgacgcctgccattgcaagagagaaaggttcatcagcgattgtagtaggacgctcgattacaaaagcggaagacccggtaaaagcctataaggctgtcagacttgaatgggagggaatcaaatcttga

SEQ ID NO: 156369 - protein, 239 aa, Bacillus subtilis
MKNNLPIIALDFASAEETLAFLAPFQQEPLFVKVGMELFYQEGPSIVKQLKERNCELFLDLKLHDIPTTVNKAMKRLASLGVDLVNVHAAGGKKMMQAALEGLEEGTPAGKKRPSLIAVTQLTSTSEQIMKDELLIEKSLIDTVVHYSKQAEESGLDGVVCSVHEAKAIYQAVSPSFLTVTPGIRMSEDAANDQVRVATPAIAREKGSSAIVVGRSITKAEDPVKAYKAVRLEWEGIKS

SEQ ID NO: 156370 - DNA, 714 bp, Bradyrhizobium japonicum
  CDS (1)..(714): transl_table=11
atgacgccagccgagatcgccccgaaggaccgcctgatcgttgcgctcgatctgccgagcgttgatgccgcggaggcgatgatcgcaaggctcggcgacagcgtcacgttctacaagatcggctatcgcctcgcctatgccggcggcttgccgctcgttgcgaggctcgcggacaagggcaagaaggtctttctcgatctcaagctgcacgacatcggcaacaccgtggcgcaaggcgtcgagagcatcaccaggctgggcgcgaccttcctcaccgtgcacgcttatccgcagaccatgaagggcgccgtcgaaggccgcggcggctcgaacctgaagatcctcgccgtcaccgtcctgacctcctacaacgaggacgatctgcacgcggcgggtttccggctcggcgtcgccgagctcgtcgaagcgcgcgcgcagcaggcgcaggtgcttggcatcgacgggctggtgtcgtcgcccgaggaggtgggcgccttgcgcaagatcgtcggccaccagatgagcctcgtcacgcccggcatccggccggcgggctcggcaagtggcgatcagaaacgcatcatgacgccgggccgcgcgatcaccgcgggcgccgattatctcgtcgtcgggcgcccggtggtggaagccgccgagcccaaggcgatcgcagacgccatccaggccgagatcgggcaggcgctgggagcatga

SEQ ID NO: 156371 - protein, 237 aa, Bradyrhizobium japonicum
MTPAEIAPKDRLIVALDLPSVDAAEAMIARLGDSVTFYKIGYRLAYAGGLPLVARLADKGKKVFLDLKLHDIGNTVAQGVESITRLGATFLTVHAYPQTMKGAVEGRGGSNLKILAVTVLTSYNEDDLHAAGFRLGVAELVEARAQQAQVLGIDGLVSSPEEVGALRKIVGHQMSLVTPGIRPAGSASGDQKRIMTPGRAITAGADYLVVGRPVVEAAEPKAIADAIQAEIGQALGA

SEQ ID NO: 156372 - DNA, 837 bp, Cladosporium fulvum
  CDS (1)..(837)
atgtcgtccaagtcgcaattgccctttagcacccgtgcctctaaccaccccaacccgctggctcggaagctgttcgaggtcgctgaagccaaaaagagcaatgtgacagtttccgccgatgtcaccaccaccaaggagctcctggacctggccgaccgtctcggaccctacattgccgtgatcaaaacacacatcgatatcttgtccgacttcggacccgagaccatcaatggcctgaacgcgctggccgagaagcacaactttctcatctttgaggaccgcaagttcatcgacatcggtaacaccgtccagaagcagtaccacggcggtgccctcaagatctccgagtgggcccacattatcaactgcgccgttctgccagccgagggcatcgtccaggctctggccgaaactgcacaggccgaggacttcccccatggttctgagcgcggtcttctgattctcgctgagatgacctccaagggctccttggctaccggagagtacacctctgcctcggttgactacgcgcggaaataccccagcttcgtgcttggcttcgtctcgacccgtgcgctgaccgaggtctcttcgaccgtcaccgctgccgacaacgaggacttcgtcgtcttcaccaccggtgtcaacctttcttctaagggcgacaagctcggacagcagtaccagaccccgcagtcggctattggccgcggtgccgactttatcatcgcgggacgtggaatctatactgctccagaccccgtcgaggcagccaagcaataccagcagcagggatgggaagcctatctggctcgtgttggcggtgccagccaataa

SEQ ID NO: 156373 - protein, 278 aa, Cladosporium fulvum
MSSKSQLPFSTRASNHPNPLARKLFEVAEAKKSNVTVSADVTTTKELLDLADRLGPYIAVIKTHIDILSDFGPETINGLNALAEKHNFLIFEDRKFIDIGNTVQKQYHGGALKISEWAHIINCAVLPAEGIVQALAETAQAEDFPHGSERGLLILAEMTSKGSLATGEYTSASVDYARKYPSFVLGFVSTRALTEVSSTVTAADNEDFVVFTTGVNLSSKGDKLGQQYQTPQSAIGRGADFIIAGRGIYTAPDPVEAAKQYQQQGWEAYLARVGGASQ

SEQ ID NO: 156374 - DNA, 825 bp, Coccidioides posadasii
  CDS (1)..(825)
atggcctccaaatcacaattcccgtacgaagaccgtgcgcgcgaccatcccaatccacttgcacgacgattattccagattgcgaccgagaaacagtcaaatgtcgtggtctcggccgatgtcacaactacaaaggagctccttgacctggctgacagactcggcccctacatggtcgttctaaaaactcacatcgatatcctcgccgacttctccgccgaaaccataaccggactccaatccctttcccagaagcacaacttcctgatctttgaggaccggaaattcgttgatattggcaacacagtgcaaaaacaataccatgggggcgcactccacatttcggaatgggctcatatcgttaatgcaaccgtgcttccgggcccaggtatcatagatgccctagcgcaagttgcttctgcaccagacttcccccacgcttcagacagagggctcctgatcttggcgacgatgacatcaaagggtagtcttgctactggtcagtatactgagttgtcggttgagctggcgcggaagtacaagggctttgtcctaggcttcgtggccagcaggtccttagaaggagttgaaacggctggaaaggcggatgatgaggattttgtcctcttcacgacaggtgttaaccttgcttccaagggtgatgcattgggacagcagtatcagacccctgaatcagccattggaggcggtgcggactttattatcagtggacgcgggatctatgcggctcctgacccggttgatgccgctaggcggtatcaaaaagcgggctgggatgcttatttgaaaagagtgggcagataa

SEQ ID NO: 156375 - protein, 274 aa, Coccidioides posadasii
MASKSQFPYEDRARDHPNPLARRLFQIATEKQSNVVVSADVTTTKELLDLADRLGPYMVVLKTHIDILADFSAETITGLQSLSQKHNFLIFEDRKFVDIGNTVQKQYHGGALHISEWAHIVNATVLPGPGIIDALAQVASAPDFPHASDRGLLILATMTSKGSLATGQYTELSVELARKYKGFVLGFVASRSLEGVETAGKADDEDFVLFTTGVNLASKGDALGQQYQTPESAIGGGADFIISGRGIYAAPDPVDAARRYQKAGWDAYLKRVGR

SEQ ID NO: 156376 - DNA, 738 bp, Mannheimia succiniciproducens (strain MBEL55E)
  CDS (34)..(738): transl_table=11
ttgaaagccaaatttagcaaagaggaagttaatatgagtaataaaattatcgtagcattagattacgaaacggaaaaagaagcgctccaattagtggatcaaatcgatccgagtttatgccgcttaaaagtgggtaaagaaatgtttactaccttaggtacaaattttgtaaaactgctgcaagaccgtgactttgatgtgtttttggatttaaaattccacgatattccgaatacggttgcaagagcggtacgttcagccgccgatcttggagtatggatggtggatctacatgccagcggcggtttacgaatgatggaagaagcgaagaagattcttgagccttacggtaaagatgcgccgattctgattagcgttaccgttttaaccagtatggaagatttggatttgttacaaatcggtattaacgcttcaccgatggagcaagttatccgccttgctcatctaagtcaacgtgcgggtttagacggtgtggtttgttcgccgcaggaagtggaaattttacgtcaacatttaggtaaagagttcaaattaattacaccgggaattcgtcccgtgggttctgaattcggtgatcaacgccgagtcatgactcctccggcggcaattgaagccggttccgattatttagtgattgggcgcccgattacgcaagcggcaaatccggctgaagtgttgcgttcaattaatgcgtctattgcgaatttaatcgcttaa

SEQ ID NO: 156377 - protein, 234 aa, Mannheimia succiniciproducens (strain MBEL55E)
MSNKIIVALDYETEKEALQLVDQIDPSLCRLKVGKEMFTTLGTNFVKLLQDRDFDVFLDLKFHDIPNTVARAVRSAADLGVWMVDLHASGGLRMMEEAKKILEPYGKDAPILISVTVLTSMEDLDLLQIGINASPMEQVIRLAHLSQRAGLDGVVCSPQEVEILRQHLGKEFKLITPGIRPVGSEFGDQRRVMTPPAAIEAGSDYLVIGRPITQAANPAEVLRSINASIANLIA

SEQ ID NO: 156378 - DNA, 831 bp, Penicillium camembertii
  CDS (1)..(831)
atgtcgtccaagtcgcaattgacttacagcgcccgcgctcaatcgcaccccaatcctcttgcgcgcaagcttttccaagtcgctgaagaaaagaagagcaatgtgaccgtctccgctgacgtgaccacgacaaaggagctcctggacctcgccgaccgccttggcccctacatcgccgtgatcaaaacccacatcgacatcctctccgacttcagccaagaaacaatcgacggcctgaacgccctagcccaaaagcacaacttcctcatcttcgaagaccgcaaattcatcgacatcggcaacacagtccagaaacagtaccacaacggcaccctccgcatctcggaatgggcccacataatcaactgctccgtccttcctggcgagggcatcgtccaggccctcgcacaaaccgcccaggccactgacttcccctacggctccgagcgcggcctcctcatcctcgccgagatgacctccaagggatccctcgcaacaggctcctacacctccgcctccgttgacatcgcgcgcaagtaccccagctttgttctgggctttgtctccacccgctcgttgggtgaggtcgagtctactgaggcgcccgcccagggcgaggacttcgtcgtcttcaccactggtgtcaacctctcgtctaagggcgataagctcggtcagcagtaccagacaccgcagtcggctattggccgcggtgccgacttcattatctctggtcgtggtatctatgccgctgcggaccctgttgaggctgctaagcagtaccagcaacagggatgggaggcgtatctggcccgcgtgggcgcgcaatag

SEQ ID NO: 156379 - protein, 276 aa, Penicillium camembertii
MSSKSQLTYSARAQSHPNPLARKLFQVAEEKKSNVTVSADVTTTKELLDLADRLGPYIAVIKTHIDILSDFSQETIDGLNALAQKHNFLIFEDRKFIDIGNTVQKQYHNGTLRISEWAHIINCSVLPGEGIVQALAQTAQATDFPYGSERGLLILAEMTSKGSLATGSYTSASVDIARKYPSFVLGFVSTRSLGEVESTEAPAQGEDFVVFTTGVNLSSKGDKLGQQYQTPQSAIGRGADFIISGRGIYAAADPVEAAKQYQQQGWEAYLARVGAQ

SEQ ID NO: 156380 - DNA, 705 bp, Rhizobium fredii
  CDS (1)..(705): transl_table=11
atgagcacaagcgcgcgcgaccggctgatcgtcggcctcgaccttccgacgatcgccgaggcggaaaggatcgtctcgacgcttggcgacgatgtcgccttctacaagatcggctatcagctcgccttcgccggcggtctggaattcgcccgcgatctggcggcgagcggcaagaaggtcttcctcgacatgaagctgctcgacatcgacaatacggtggcgaagggcgttgagaacatcgtcaggatgggcatgtcgatgctgacgctgcacgcctatccgaaggcgatgaaggcggccgtcgacgcggcgaagggctccgatctctgcctgctcggcgtcacggtgctgacctcgatggacgcgcaggacgtcatcgatgccggctacggctccgatccgcatactctggtgctgcgcagggccgaacaggcgcgcgcggccggcatgggcggcatcgtctgctcggccgaggaagccaccgccgtgcgccgcatcatcggcgcggagatggcggtggtgacgcccggcattcgccccaccggtgcggagaaaggcgaccagaaacgggtgatgacgccggccgaggcgatccgcgccggatcgagccacctcgtcgtcgcccggccgatcgtcaaggcggccgatccgcttagtgccagccgcgccatcctggcggagatggagggcgtcctctcagcctga

SEQ ID NO: 156381 - protein, 234 aa, Rhizobium fredii
MSTSARDRLIVGLDLPTIAEAERIVSTLGDDVAFYKIGYQLAFAGGLEFARDLAASGKKVFLDMKLLDIDNTVAKGVENIVRMGMSMLTLHAYPKAMKAAVDAAKGSDLCLLGVTVLTSMDAQDVIDAGYGSDPHTLVLRRAEQARAAGMGGIVCSAEEATAVRRIIGAEMAVVTPGIRPTGAEKGDQKRVMTPAEAIRAGSSHLVVARPIVKAADPLSASRAILAEMEGVLSA

SEQ ID NO: 156382 - DNA, 705 bp, Rhizobium meliloti
  CDS (1)..(705): transl_table=11
atgagcacaagcgcgcgcgaccggctgatcgtcggccttgatcttccaacggtgaccgaggccgagaaaatcgtctcgacgctcggcgaggaagtcctcttctataagatcggctatcaactggccttcgccggcggcctcgacttcgcgcgcgatctcgccgcgagcggcaagcaggtcttcctcgacatgaagctgctcgacatcgacaacacggtggccaagggcgtggagaacatcgtcaagatgggcgtgtcgatgttgacgctgcacgcctatccgaaggcgatgaagtcggcggtcgaagcggccaggggctcgaacctctgccttcttggcgtgacggtgctcacctcgatggacgaacaggacgtcatcgatgccggttatgaatatgatccgcacagcctggtcctgcgccgcgccgaacaggcccgcgccgcaggcatggggggcatcgtctgctcggcggaggaggccgccgccgtgcgaaagatcatcggcggcgacatggcgctggtgacgccgggcatccgcccggccggtgcggaaaaaggcgaccagaagcgggtgatgacgccggccgacgcgcttcgcgccggctcgagccacctcgtcgtcgggcggccgatcgttgccgcgcccgaccctctcgcagcaagccgcgcgatcctggccgaaatggagagcgccctctcccgttga

SEQ ID NO: 156383 - protein, 234 aa, Rhizobium meliloti
MSTSARDRLIVGLDLPTVTEAEKIVSTLGEEVLFYKIGYQLAFAGGLDFARDLAASGKQVFLDMKLLDIDNTVAKGVENIVKMGVSMLTLHAYPKAMKSAVEAARGSNLCLLGVTVLTSMDEQDVIDAGYEYDPHSLVLRRAEQARAAGMGGIVCSAEEAAAVRKIIGGDMALVTPGIRPAGAEKGDQKRVMTPADALRAGSSHLVVGRPIVAAPDPLAASRAILAEMESALSR

SEQ ID NO: 156384 - DNA, 795 bp, Torulaspora delbrueckii
  CDS (1)..(795)
atgtcggttgctacttatcaagagagggctgcaaagcatccaagtcctgtggcttcaaaacttttgaatttgatgcatgaaaagaagaccaatctatgtgcttcattagatgtgaataccaccgaagaattgcttaaattagtcgatactctaggtccttacatctgtttgttgaaaacacacatcgatatcatttctgatttttccattgatggtactgtgaagcctttgaaagaattggccaaaaagcacaactttatgatctttgaggacaggaaattcgccgatatcggtaacactgtcaagctacagtattcttcaggtgtctacagaattgccgagtgggctgatattacaaacgcccatggtgtcactggtgctgggatcgtcactgggttgaaacaagcggctcaagagactacaaacgaaccaagaggtctattaatgttggctgaactatcttctaaaggttctttggcccatggtgaatacacccaaggtactgtcgaaattgctaagacagacaaagatttcgtcattggattcattgcccaaagagacatgggaggaagagaagaaggatatgactggctaatcatgacaccaggtgttggcctagacgacaagggcgatgcgctgggtcaacagtacagaactgtcgatgaagttgtctctacggggtcagacatcatcattgtcggcagaggacttttcgccaagggaagagatccaagagtagaaggcgaacgttaccgtaaagccggctgggaagcatacgagaagagatgccagtaa

SEQ ID NO: 156385 - protein, 264 aa, Torulaspora delbrueckii
MSVATYQERAAKHPSPVASKLLNLMHEKKTNLCASLDVNTTEELLKLVDTLGPYICLLKTHIDIISDFSIDGTVKPLKELAKKHNFMIFEDRKFADIGNTVKLQYSSGVYRIAEWADITNAHGVTGAGIVTGLKQAAQETTNEPRGLLMLAELSSKGSLAHGEYTQGTVEIAKTDKDFVIGFIAQRDMGGREEGYDWLIMTPGVGLDDKGDALGQQYRTVDEVVSTGSDIIIVGRGLFAKGRDPRVEGERYRKAGWEAYEKRCQ

SEQ ID NO: 156386 - DNA, 23 bp, Artificial sequence
  primer
atgacgttaactgcttcatcttc

SEQ ID NO: 156387 - DNA, 24 bp, Artificial sequence
  primer
ttatgcactccgctgtaaagaggc

SEQ ID NO: 156388 - protein, 243 aa, Artificial sequence
  consensus sequence
  Variant (5)..(24): Xaa in position 5 to 24 is any amino acid
  Variant (25)..(27): Xaa in position 25 to 27 is any or no amino acid
  Variant (29)..(29): Xaa in position 29 is any amino acid
  Variant (31)..(37): Xaa in position 31 to 37 is any amino acid
  Variant (39)..(50): Xaa in position 39 to 50 is any amino acid
  Variant (51)..(57): Xaa in position 51 to 57 is any or no amino acid
  Variant (63)..(63): Xaa in position 63 is any amino acid
  Variant (70)..(72): Xaa in position 70 to 72 is any amino acid
  Variant (74)..(87): Xaa in position 74 to 87 is any amino acid
  Variant (88)..(90): Xaa in position 88 to 90 is any or no amino acid
  Variant (92)..(94): Xaa in position 92 to 94 is any amino acid
  Variant (96)..(110): Xaa in position 96 to 110 is any amino acid
  Variant (111)..(123): Xaa in position 111 to 123 is any or no amino acid
  Variant (125)..(126): Xaa in position 125 to 126 is any amino acid
  Variant (129)..(129): Xaa in position 129 is any amino acid
  Variant (133)..(144): Xaa in position 133 to 144 is any amino acid
  Variant (145)..(156): Xaa in position 145 to 156 is any or no amino acid
  Variant (158)..(162): Xaa in position 158 to 162 is any amino acid
  Variant (163)..(163): Xaa in position 163 is any or no amino acid
  Variant (165)..(166): Xaa in position 165 to 166 is any amino acid
  Variant (168)..(168): Xaa in position 168 is any amino acid
  Variant (172)..(173): Xaa in position 172 to 173 is any amino acid
  Variant (175)..(180): Xaa in position 175 to 180 is any amino acid
  Variant (181)..(189): Xaa in position 181 to 189 is any or no amino acid
  Variant (191)..(193): Xaa in position 191 to 193 is any amino acid
  Variant (197)..(197): Xaa in position 197 is any amino acid
  Variant (199)..(205): Xaa in position 199 to 205 is any amino acid
  Variant (206)..(207): Xaa in position 206 to 207 is any or no amino acid
  Variant (209)..(209): Xaa in position 209 is any amino acid
  Variant (211)..(212): Xaa in position 211 to 212 is any amino acid
  Variant (215)..(216): Xaa in position 215 to 216 is any amino acid
  Variant (218)..(219): Xaa in position 218 to 219 is any amino acid
  Variant (220)..(220): Xaa in position 220 is any or no amino acid
  Variant (222)..(225): Xaa in position 222 to 225 is any amino acid
  Variant (227)..(227): Xaa in position 227 is any amino acid
  Variant (231)..(236): Xaa in position 231 to 236 is any amino acid
  Variant (237)..(242): Xaa in position 237 to 242 is any or no amino acid
VALDXXXXXXXXXXXXXXXXXXXXXXXKXGXXXXXXXGXXXXXXXXXXXXXXXXXXXFLDLKXHDIPNTXXXAXXXXXXXXXXXXXXXXXHXXXGXXXXXXXXXXXXXXXXXXXXXXXXXXXXLXXVTXLTSXXXXXXXXXXXXXXXXXXXXXXXXAXXXXXXGXXGXVCSXXEXXXXXXXXXXXXXXXFXXXTPGXRXXXXXXXXXQXRXXTPXXAXXXGXXXXVXGRPXXXXXXXXXXXXP

SEQ ID NO: 156389 - protein, 16 aa, Artificial sequence
  protein pattern
  Variant (6)..(6): Xaa in position 6 is any amino acid
  Variant (11)..(11): Xaa in position 11 is any amino acid
  Variant (13)..(15): Xaa in position 13 to 15 is any amino acid
  Variant (16)..(16): Xaa in position 16 is Ala, Gly, Ser or Thr
FLDLKXHDIPXTXXXX

SEQ ID NO: 156390 - protein, 12 aa, Artificial sequence
  protein pattern
  Variant (2)..(2): Xaa in position 2 is Ile or Val
  Variant (6)..(6): Xaa in position 6 is Ile or Val
  Variant (7)..(8): Xaa in position 7 to 8 is any amino acid
  Variant (9)..(9): Xaa in position 9 is Ala, Asp, Ser or Thr
  Variant (10)..(11): Xaa in position 10 to 11 is any amino acid
VXGRPXXXXXXP

SEQ ID NO: 156391 - protein, 15 aa, Artificial sequence
  protein pattern
  Variant (3)..(3): Xaa in position 3 is Ile or Val
  Variant (5)..(5): Xaa in position 5 is Leu or Pro
  Variant (6)..(7): Xaa in position 6 to 7 is any amino acid
  Variant (8)..(8): Xaa in position 8 is Ala, Asp, Glu, Gly, Ser or Thr
  Variant (9)..(11): Xaa in position 9 to 11 is any amino acid
  Variant (14)..(14): Xaa in position 14 is any amino acid
PGXRXXXXXXXDQXR

SEQ ID NO: 156392 - DNA, 600 bp, ESCHERICHIA COLI
  CDS (1)..(600): transl_table=11
atgaacaaacacaccgaacatgatactcgcgaacatctcctggcgacgggcgagcaactttgcctgcaacgtggattcaccgggatggggctaagcgaattactaaaaaccgctgaagtgccgaaagggtccttctatcactactttcgctctaaagaagcgtttggcgttgccatgcttgagcgtcattacgccgcatatcaccagcgactgactgagttgctgcaatccggcgaaggtaactaccgcgaccgcatactggcttattaccagcaaacactgaaccagttttgccaacatggaaccatcagtggttgcctgacagtaaaactctctgccgaagtgtgcgatctgtcagaagatatgcgcagcgcgatggataaaggtgctcgcggcgtgatcgccctgctctctcaggcgctggaaaatggccgtgagaaccattgtttaaccttttgtggcgaaccgctgcaacaggcacaagtgctttacgcactgtggcttggcgcgaatctgcaggccaaaatttcgcgcagtttcgagccactggaaaacgcgctggcccatgtaaaaaacattattgcgacgcctgccgtttaa

SEQ ID NO: 156393 - protein, 199 aa, ESCHERICHIA COLI; identical to SEQ ID NO: 25775

SEQ ID NO: 156394 - DNA, 516 bp, Escherichia coli str. K-12 substr. W3110
  CDS (1)..(516): transl_table=11
atggggctaagcgaactcctaaaaaccgctgaagtgccgaaagggtccttctatcactactttcgttctaaagaagcgtttggcgttgctatgcttgagcgccattacgccgcatatcaccagcgactgactgagttgctgcaatccggcgaaggtaactaccgcgaccgcatactggcttattaccagcaaacactgaaccagttttgccaacatggaaccatcagtggttgcctgacagtaaaactctctgccgaagtgtgcgatctgtcagaagatatgcgcagcgcaatggataaaggggctcgcggcgtgatcgccctgctctctcaggcgctggaaaatggccgtgagaaccattgtttaaccttttgtggcgaaccgctgcaacaggcacaagtgctttacgcactgtggcttggcgcgaatctgcaggccaaaatttcgcgcagtttcgagccactggaaaacgcgctggcccatgtaaaaaacattattgcgacgcctgccgtttag

SEQ ID NO: 156395 - protein, 171 aa, Escherichia coli str. K-12 substr. W3110
MGLSELLKTAEVPKGSFYHYFRSKEAFGVAMLERHYAAYHQRLTELLQSGEGNYRDRILAYYQQTLNQFCQHGTISGCLTVKLSAEVCDLSEDMRSAMDKGARGVIALLSQALENGRENHCLTFCGEPLQQAQVLYALWLGANLQAKISRSFEPLENALAHVKNIIATPAV

SEQ ID NO: 156396 - DNA, 585 bp, Pseudomonas aeruginosa PAO1; identical to SEQ ID NO: 25686
  CDS (1)..(585): transl_table=11

SEQ ID NO: 156397 - protein, 194 aa, Pseudomonas aeruginosa PAO1; identical to SEQ ID NO: 25687

SEQ ID NO: 156398 - DNA, 600 bp, Escherichia coli O157:H7 EDL933; identical to SEQ ID NO: 25688
  CDS (1)..(600): transl_table=11

SEQ ID NO: 156399 - protein, 199 aa, Escherichia coli O157:H7 EDL933; identical to SEQ ID NO: 25689

SEQ ID NO: 156400 - DNA, 600 bp, Yersinia pestis CO92
  CDS (1)..(600): transl_table=11
atgaacaaaatacagcatacacatgtagacacccgagaacatctactcgccacaggtgaaaggctcagtttacgcctcggttttaatggtatggggttgagcctgctgctgactaccgcgggtatcccaaaaggctcgttttatcactattttcgttcaaaagaagtgtttggcgaggccatgctccaacgctattttgaccgttatgatgcggagatggaaagcctgttagccggttcacagggtgataaacgccatcatctattgcactattttgctcaatctattgctaactattgtgggagtgaatgccacaacgcgtgtctggcggttaaactctccgctgaggtgagtgatttatccgaacctatgcgccatgcgttggatatcggcactgctcgagtgattggccgcttgcaggatgccattgaagccggaattgacgaaggctctttgcgaacggtgctctctccggcggcaaccgcagaaacgctttacgccttgtggctaggcgcgtcgctgcgggcaaaagtgaaacactctgtcgccccactgacttgtgcactgggaagcattgaactcatattacaaccagcctaa

SEQ ID NO: 156401 - protein, 199 aa, Yersinia pestis CO92
MNKIQHTHVDTREHLLATGERLSLRLGFNGMGLSLLLTTAGIPKGSFYHYFRSKEVFGEAMLQRYFDRYDAEMESLLAGSQGDKRHHLLHYFAQSIANYCGSECHNACLAVKLSAEVSDLSEPMRHALDIGTARVIGRLQDAIEAGIDEGSLRTVLSPAATAETLYALWLGASLRAKVKHSVAPLTCALGSIELILQPA

SEQ ID NO: 156402 - DNA, 600 bp, Salmonella enterica subsp. enterica serovar Typhi str. CT18
  CDS (1)..(600): transl_table=11
atgaataagcaaaccgaacatgatacccgcgaacatctgctggccaccggcgagcagctttgtatgcaacggggttttaccggcatggggcttagcgaattgctcaaaaccgcccaggtgcctaaagggtcgttttatcactactttcgctcgaaagaagccttcggcgtcgccatgcttgagcgacattacgcctgctatcatcagcgtcttacggcgcacttcacctccggtcccggtaatcatcgcgatcgccttctcgcctggtatcaggaaacgttaaagcagttttgccagcaaggcgccatcagcggttgcctgacggtgaaactgtcagcggaggtctgcgatctgtcggaggatatgcgctctacgatggataaaggggcgcaggagatcatggcactgcttgcacgcgcgctggaagatggccgtaatagccactgtttacatttcaccggccagccgttgccacaggcgcaggtactttatgccctgtggctgggcgccaatttgcaggccaaaatatcccgtagcgccgcgccgctggaaaatgcgttggcgcatgttaagaccatcattgcaacgcctgagcagtaa

SEQ ID NO: 156403 - protein, 199 aa, Salmonella enterica subsp. enterica serovar Typhi str. CT18; identical to SEQ ID NO: 25691

SEQ ID NO: 156404 - DNA, 630 bp, Ralstonia solanacearum GMI1000; identical to SEQ ID NO: 25692
  CDS (1)..(630): transl_table=11

SEQ ID NO: 156405 - protein, 209 aa, Ralstonia solanacearum GMI1000; identical to SEQ ID NO: 25693

SEQ ID NO: 156406 - DNA, 597 bp, Shewanella oneidensis MR-1; identical to SEQ ID NO: 25698
  CDS (1)..(597): transl_table=11

SEQ ID NO: 156407 - protein, 198 aa, Shewanella oneidensis MR-1; identical to SEQ ID NO: 25699

SEQ ID NO: 156408 - DNA, 585 bp, Vibrio vulnificus CMCP6; identical to SEQ ID NO: 25700
  CDS (1)..(585): transl_table=11

SEQ ID NO: 156409 - protein, 194 aa, Vibrio vulnificus CMCP6; identical to SEQ ID NO: 25701

SEQ ID NO: 156410 - DNA, 618 bp, Chromobacterium violaceum ATCC 12472; identical to SEQ ID NO: 25706
  CDS (1)..(618): transl_table=11

SEQ ID NO: 156411 - protein, 205 aa, Chromobacterium violaceum ATCC 12472; identical to SEQ ID NO: 25707

SEQ ID NO: 156412 - DNA, 603 bp, Yersinia enterocolitica subsp. enterocolitica 8081
  CDS (1)..(603): transl_table=11
atgaacaaaacacagcacgcacatgtagacactcgtgaacatctattagcaaccggtgagagcctcagcctacgcctcggttttaatggcatgggtctcagccagttactcacgactgcgggtatccctaagggttcgttttatcactatttccgctcaaaggaagtatttggtgaggcgatgctacagcgctattttgatcgctatgatgcacagatggcaaccctgttaaccggttcacaaggtgataagcgccaccatctgctgcactattttgctcaagcgattgctaactattgtggcagtgaatgccacaatgcttgtctggcggttaaactatcagctgaagtgagtgatttatctgaacctatgcgtcatgcgttagatatcggcactgctcgcgtcattggtcgtttgcaagatgccatcgaagccggcattgaagaaggctctttgcgtattacgctttcccctgcggcaaccgcagaaacgctctatgccttgtggctgggcgcttcgttgcgagcgaaggtgaaacgatcagttgcgccgctgacctgtgcgctagaaagtatcgaactgattttacaacccgctcaatga

SEQ ID NO: 156413 - protein, 200 aa, Yersinia enterocolitica subsp. enterocolitica 8081
MNKTQHAHVDTREHLLATGESLSLRLGFNGMGLSQLLTTAGIPKGSFYHYFRSKEVFGEAMLQRYFDRYDAQMATLLTGSQGDKRHHLLHYFAQAIANYCGSECHNACLAVKLSAEVSDLSEPMRHALDIGTARVIGRLQDAIEAGIEEGSLRITLSPAATAETLYALWLGASLRAKVKRSVAPLTCALESIELILQPAQ

SEQ ID NO: 156414 - DNA, 600 bp, Klebsiella pneumoniae subsp. pneumoniae MGH 78578; identical to SEQ ID NO: 25678
  CDS (1)..(600): transl_table=11

SEQ ID NO: 156415 - protein, 199 aa, Klebsiella pneumoniae subsp. pneumoniae MGH 78578; identical to SEQ ID NO: 25679

SEQ ID NO: 156416 - DNA, 585 bp, Pseudomonas aeruginosa PA7
  CDS (1)..(585): transl_table=11
atgaaaaccagctacgacgatacccgccagcatctgctcgataccggataccggatcatggcggtcaaaggcttctccggagtcggcctcaacgaaatcctgcagaccgcgggcgtgcccaagggctcgttctatcactacttcaagtccaaggagcagttcggccaggccctgctggaagactacttccgcgcctacctggcggacatggaccagcgcttcgccgctcccgggctgaatggccgcgagcggctgatgagctactggcagaagtggctggacaactcccgcactccctgcgacgagcagaggtgcctggtggtcaagctcagcgccgaggtcgcggatctttccgagagcatgcggatcaccctgcgcgacggttcggacgggatcatcgagcgactcgccgggtgcatcgaacagggccgcgcggacgcttccctcgcgccctgcgacgcccgtcgcaaggccagcgccctgtaccagctgtggctgggggcgagcctgctgagcaagctgcatcgtcatcccggtccgctggaaagcgcgatggaaaccaccaggagccagttggagccctga

SEQ ID NO: 156417 - protein, 194 aa, Pseudomonas aeruginosa PA7
MKTSYDDTRQHLLDTGYRIMAVKGFSGVGLNEILQTAGVPKGSFYHYFKSKEQFGQALLEDYFRAYLADMDQRFAAPGLNGRERLMSYWQKWLDNSRTPCDEQRCLVVKLSAEVADLSESMRITLRDGSDGIIERLAGCIEQGRADASLAPCDARRKASALYQLWLGASLLSKLHRHPGPLESAMETTRSQLEP

SEQ ID NO: 156418 - DNA, 582 bp, Cronobacter sakazakii ATCC BAA-894
  CDS (1)..(582): transl_table=11
atgaaccgaacacctgaacacgacacgcgcgaacatctccttgcaactggcgagcagctctgcctgcaacgcggttttaccggcatgggattaagcgagctgttaaaaaccgcgggcgtaccgaaaggctccttctaccactactttcgctcgaaagaggcgtttggcgtggcgatgctggagcgtcactacgcccggtatcagacgtgccttgagcaacacttcgacccggcgggcccggcgcgcgagcagctgatcgcctggtttgaacagacgcttcaccattactgccagacgggcaagatgatgggctgcctgaccgtgaagctctctgcggaagtatgcgatctgtcggaagatatgcgcggcgcgcttgataaaggtgcggcgcaggtcatcgccctgctggcagaggcgcttgagcgcggccgcgatgcagaggcgctgaccttcagcggtagcgcgcagcagcgggcgcaggtgttatacgtgctctggcttggcgcaagcctgcaggccaaagtgtcgcgcagcggcgcgccgctcgaaaacgcgctggcgcacgttaaagaaatcctttga

SEQ ID NO: 156419 - protein, 193 aa, Cronobacter sakazakii ATCC BAA-894
MNRTPEHDTREHLLATGEQLCLQRGFTGMGLSELLKTAGVPKGSFYHYFRSKEAFGVAMLERHYARYQTCLEQHFDPAGPAREQLIAWFEQTLHHYCQTGKMMGCLTVKLSAEVCDLSEDMRGALDKGAAQVIALLAEALERGRDAEALTFSGSAQQRAQVLYVLWLGASLQAKVSRSGAPLENALAHVKEIL

SEQ ID NO: 156420 - DNA, 588 bp, Vibrio harveyi ATCC BAA-1116
  CDS (1)..(588): transl_table=11
atgaacgcaaaaacgaacgatacacgccaacacatactcgatgtcggctaccaattggtagtgaccaaaggttttacgagcgttgggctctcagaacttttaaaggcagcggatgtgccgaaaggctctttctaccattactttaagtcgaaagaacaatttggtgaggcattgattgaagattacttctctcgctaccttaagatgatcacagcccattttactgaaagtgaaggctctggtcgcgaccgccttttgagctactttgagcgctggatggcgattgaaaatggcaaatgtaacgccaataaatgcttagtggtgaagttgagtgctgaagtctctgatctttcagaagcaatgcgcgcaaaactggcttcgggtgccactcatgtggtgaaaaccatcgaagattgtgtccaagcgggcattgaagacggctctatccaagttgattcagcagagcagactgcccacttgatttaccatcaatggattggtgcaagcttactcaacaaactgtatcaggatcgttccggtttaattcgtagctttgagagcactcaaagtatgctaaaaagcaaatag

SEQ ID NO: 156421 - protein, 195 aa, Vibrio harveyi ATCC BAA-1116
MNAKTNDTRQHILDVGYQLVVTKGFTSVGLSELLKAADVPKGSFYHYFKSKEQFGEALIEDYFSRYLKMITAHFTESEGSGRDRLLSYFERWMAIENGKCNANKCLVVKLSAEVSDLSEAMRAKLASGATHVVKTIEDCVQAGIEDGSIQVDSAEQTAHLIYHQWIGASLLNKLYQDRSGLIRSFESTQSMLKSK

SEQ ID NO: 156422 - DNA, 600 bp, Citrobacter koseri ATCC BAA-895
  CDS (1)..(600): transl_table=11
atgaacaaacagactgaacatgatacccgcgaacatcttctggctaccggcgagcagctttgtatgcagcgtggcttcaccggaatgggattgagcgagctgctcaaaaccgccgaagtgccgaaggggtcgttttatcactattttcgttccaaagaagcgtttggcgtcgccatgctggaacggcattacgccggatatcatcagcggctggcaacgcattttgacgccggagcgggcaactaccgtgaccgcattctggcttactatcaggaaaccctgaatcagttttgccagcaaggcactatcagcggctgtttgaccgtaaagctgtccgccgaagtgtgcgatctctcagaagatatgcgcactgcgatggacaaaggcgcgcggcatattattacgctgttagcgcaagcgctggaaaaaggacgcgaagcccgctgtctctcttttgctggcgagtcgctgcaacaggcgcagatcctgtatgcgctgtggttaggcgcgaatctgcacgccaaaatttctcgcagtgccgccccgcttgaaagcgcgctggcacatgtaaaaacgattatcgcaacgcctgcggcttaa

SEQ ID NO: 156423 - protein, 199 aa, Citrobacter koseri ATCC BAA-895
MNKQTEHDTREHLLATGEQLCMQRGFTGMGLSELLKTAEVPKGSFYHYFRSKEAFGVAMLERHYAGYHQRLATHFDAGAGNYRDRILAYYQETLNQFCQQGTISGCLTVKLSAEVCDLSEDMRTAMDKGARHIITLLAQALEKGREARCLSFAGESLQQAQILYALWLGANLHAKISRSAAPLESALAHVKTIIATPAA

SEQ ID NO: 156424 - DNA, 600 bp, Escherichia coli E24377A
  CDS (1)..(600): transl_table=11
atgaacaaacacaccgaacatgatactcgcgaacatctcctggcgacgggcgagcaactttgcctgcaacgtggattcaccgggatggggctaagcgaattactaaaaaccgctgaagtgccgaaagggtccttctatcactactttcgctctaaagaagcgtttggcgttgccatgcttgggcgtcattacgccgcatatcaccagcgactgactgagttgctgcaatccggcgaaggtaactaccgcgaccgcatactggcttattaccagcaaacactgaaccagttttgccaacatggaaccatcagtggttgcctgacagtaaaactctctgccgaagtgtgcgatctgtcagaagatatgcgcagcgcgatggataaaggtgctcgcggcgtgatcgccctgctctctcaggcgctggaaaatggccgtgagaaccattgtttaaccttttgtggcgaaccgctacaacaggcacaagtgctttacgcactatggctgggtgcgaatctgcaggccaaaatttcgcgcagtttcgagccactggaaaacgcgctggcccatgtaaaaaacattattgcgacgcctgccgtttag

SEQ ID NO: 156425 - protein, 199 aa, Escherichia coli E24377A
MNKHTEHDTREHLLATGEQLCLQRGFTGMGLSELLKTAEVPKGSFYHYFRSKEAFGVAMLGRHYAAYHQRLTELLQSGEGNYRDRILAYYQQTLNQFCQHGTISGCLTVKLSAEVCDLSEDMRSAMDKGARGVIALLSQALENGRENHCLTFCGEPLQQAQVLYALWLGANLQAKISRSFEPLENALAHVKNIIATPAV

SEQ ID NO: 156426 - DNA, 600 bp, Salmonella enterica subsp. arizonae serovar 62:z4,z23:--
  CDS (1)..(600): transl_table=11
atgaataaacaaaccgaacacgatacccgcgaacatctcctgaccatcggcgagttactttgcatgcaacggggttttaccggaatgggtcttagcgagctactcaaaaccgcccaggtgcccaaggggtcgttttaccactactttcgctcgaaagaagccttcggcgtcgccatgctggagcgacactatgcctgttatcatcagcgtcttacggcgcactttacctacggacccggtgatcatcgtgatcgtattctcgcctggtatcaggaaacgttgaataagttttgccagcaaggcgccatcagcggttgtctgaccgtgaaactgtcagcagaagtctgcgatctgtcggaggatatgcgctccgctatggataaaggggcgcgtgacattactacactgcttgcacgcgcgctggaagacggccgcaatagtgactgtttacatttcactggtcagccattgcaacaggcgcaggtgctttacgccctgtggctgggcgccaatttacaggccaaaatatcccgtagcgctgaaccgctggaaaatgcgttggcgcatgttaagaccatccttacaacgcctgagcagtaa

SEQ ID NO: 156427 - protein, 199 aa, Salmonella enterica subsp. arizonae serovar 62:z4,z23:--
MNKQTEHDTREHLLTIGELLCMQRGFTGMGLSELLKTAQVPKGSFYHYFRSKEAFGVAMLERHYACYHQRLTAHFTYGPGDHRDRILAWYQETLNKFCQQGAISGCLTVKLSAEVCDLSEDMRSAMDKGARDITTLLARALEDGRNSDCLHFTGQPLQQAQVLYALWLGANLQAKISRSAEPLENALAHVKTILTTPEQ

SEQ ID NO: 156428 - DNA, 603 bp, Methylobacterium extorquens PA1
  CDS (1)..(603): transl_table=11
atggcacgcctcgctgcacagaccgacacccgacaggagatcctcgactccgcctacggcctggtcggcgcgaaggggttctctggcgtcgggctcaacgagatcctaacctcggctggtgtgccaaaggggtcattctaccactacttcggctccaaggaggctttcggtgaggcactcttggcggactacttcgagagctatctcgccgacctcgacacgacacttgccgagcctgggctgagccatgccgagcgcctgatgaactactggcgcaaatggcaggccacgcaagggggcatcgacgaccagcgcaaatgccttgcggtgaagcttgctgcggaggtctcggacctgtccgagcctatgcggctcgcccttaagagcggcactaccgcgatcatagaacggctggcgcgatccatcgcggcgggcgtggcggagggctcgcttacggtcgacagcgagccacagacaaccgccgaggatctgtatcacgtctggctcggtgcgagcttgatggccaagatcgtccggaccgacgccccattcgaggctgccattgggacaacccggcgcattctcggcctcacgtcacactga

SEQ ID NO: 156429 - protein, 200 aa, Methylobacterium extorquens PA1
MARLAAQTDTRQEILDSAYGLVGAKGFSGVGLNEILTSAGVPKGSFYHYFGSKEAFGEALLADYFESYLADLDTTLAEPGLSHAERLMNYWRKWQATQGGIDDQRKCLAVKLAAEVSDLSEPMRLALKSGTTAIIERLARSIAAGVAEGSLTVDSEPQTTAEDLYHVWLGASLMAKIVRTDAPFEAAIGTTRRILGLTSH

SEQ ID NO: 156430 - DNA, 600 bp, Escherichia coli SMS-3-5
  CDS (1)..(600): transl_table=11
atgaacaaacacaccgaacatgatactcgcgaacatctcctggcgacgggcgagcaactttgcctgcaacgtggattcaccgggatggggctaagcgaactcctaaaaactgctgaagtgccgaaagggtccttctatcactactttcgctctaaagaagcgtttggcgttgccatgcttgagcgccattacgccgcatatcaccagcgactgactgagttgctgcaatccggcgaaggtaactaccgcgaccgcatactggcttattaccagcaaacactgaaccagttttgccaacatggaaccatcagtggttgcctgacagtaaaactctctgccgaagtgtgcgatctgtcagaagatatgcgtagcgcgatggataaaggcgctcgcggcgtgatcgccctgctctcgcaggcgctggaaaatggccgtgatagccattgtttaaccttttgtggcgaaccgctgcaacaggcacaagtgctttacgcactgtggctgggtgcgaatctgcaggccaaaatttcgcgcaattacgagccactggaaaacgcgctggcacatgtaaaaaccattattgcgacgcctgccgtttag

SEQ ID NO: 156431 - protein, 199 aa, Escherichia coli SMS-3-5
MNKHTEHDTREHLLATGEQLCLQRGFTGMGLSELLKTAEVPKGSFYHYFRSKEAFGVAMLERHYAAYHQRLTELLQSGEGNYRDRILAYYQQTLNQFCQHGTISGCLTVKLSAEVCDLSEDMRSAMDKGARGVIALLSQALENGRDSHCLTFCGEPLQQAQVLYALWLGANLQAKISRNYEPLENALAHVKTIIATPAV

SEQ ID NO: 156432 - DNA, 603 bp, Beijerinckia indica subsp. indica ATCC 9039
  CDS (1)..(603): transl_table=11
atgaacgcaacgcctgtccataccgatgtccgacaacatattctggaaatcgcccggcctattttgagcggcaaggggttttccgccgttggtctgaacgagatcctagcggcagccggagtgcccaaaggatcattttatcattatttcccatccaaagaggcgttcggtgaagcgcttctggagcaatatttcacatcctctctggctcagatcgacacccttttgacgcagcccgggggcacggctgccgaccggctgatgcgctattggcagaactggctcaactcccaggcaagcagcgagacgcaggcgcaatgtcttgccgtcaagctcggggcggaggtctgcgacctctccgagcctatgcgcacaattcttcaggacggcacgatgcaaatcgtgcggcgtctggcgcgctgcatggaggaggcgcgcgcggatgggtcactgccagatcttggagattcccagcacatggcgatgaccctttaccagctctggctgggcgccagcctgctggccaagttcacccgtgatcctcggcctttcgaagaggccatgatcacaacccgcaaattgctcaaccttccagcgtcctaa

SEQ ID NO: 156433 - protein, 200 aa, Beijerinckia indica subsp. indica ATCC 9039
MNATPVHTDVRQHILEIARPILSGKGFSAVGLNEILAAAGVPKGSFYHYFPSKEAFGEALLEQYFTSSLAQIDTLLTQPGGTAADRLMRYWQNWLNSQASSETQAQCLAVKLGAEVCDLSEPMRTILQDGTMQIVRRLARCMEEARADGSLPDLGDSQHMAMTLYQLWLGASLLAKFTRDPRPFEEAMITTRKLLNLPAS

SEQ ID NO: 156434 - DNA, 588 bp, Erwinia tasmaniensis Et1/99
  CDS (1)..(588): transl_table=11
atgaacaaaacgaccctgtttgatactcgtgaacatttgctgaacaccgccgaacagttttgtctgcaacgcggcttcaatggcatggggctgatcgagctgcttaagcaggcagacgtacctaaagggtctttttaccattacttcccttcaaaggaagcgtttggtgtggcaatgctggagcgctactttgcccgtcaccatcagcggctgggtgactttctcaatcagcatcagggcagctgtcgccagcgcgtgcttgagtattatcatcagtcgcttgagtggcagcagaaaaacagctttgggggatgtctctccgtaaagctgtccgccgaagtttgcgacctttctgaggcgatgcgtagtgcgctgaaggcaggttctaccgcgttgatcgacacgctggctgccgcgctggcaaaggcgcagcagcagggaacactttcttgtgagcttaacagcgcttcatgcgcacaaacaatatatacattttggctgggagccagtctgcacagcaaaatatgtcgcgacgaggccccgctgattaatgccttgtatgagatgaaccttatcctgcgcgtttaa

SEQ ID NO: 156435 - protein, 195 aa, Erwinia tasmaniensis Et1/99
MNKTTLFDTREHLLNTAEQFCLQRGFNGMGLIELLKQADVPKGSFYHYFPSKEAFGVAMLERYFARHHQRLGDFLNQHQGSCRQRVLEYYHQSLEWQQKNSFGGCLSVKLSAEVCDLSEAMRSALKAGSTALIDTLAAALAKAQQQGTLSCELNSASCAQTIYTFWLGASLHSKICRDEAPLINALYEMNLILRV

SEQ ID NO: 156436 - DNA, 744 bp, Burkholderia pseudomallei 406e
  CDS (1)..(744): transl_table=11
ttgcgttggcgctcgcgtgcgccgattccgccggcgtgcgccgccgttttcaccgtgtctgccggcgcattccctatcgcgccccaggcccattttccgttgctagacgactggtctaatcccgcgctatcatccaccctcatgaacgccgcaaccaccgccgacgtccggcagcacattctcgacaccgccaagcccatcatgctctgcaagggcttcgcgggcgtcggcctgaacgagatcctggcggcggccggcgtcccgaaggggtcgttctaccattatttcgggtcgaaagaggcgttcggcgaatcgattctcgaatcgtatttcgacgattacgtcgcgcatctcgacgaactgctcgtgcgcggccccggcgccgcgatcgatcggctgatgcgctactggacccagtggcagcagatgcagatgggcaacgaccccgaaggcaagtgcctcgtcgtcaagctcggcgccgaggtgtgcgatctgtcggaggcgatgcgcgcggcgctcgagcgcggcacgtcgcagatcgtcgcgcggctcgccgcgtgcatcgcggcggcgctcgacgacggctcgctgaaggtcgatctcgagccgcagcagacggccgcgatgctgtacgagctgtgggtcggcgcgacgctcatcgagaagatccggcgcgacggcgagccgctcgccgtcgcgatggcgagcacgcgccgggtcctcggtctgacgggcgcgcgttga

SEQ ID NO: 156437 - protein, 247 aa, Burkholderia pseudomallei 406e
MRWRSRAPIPPACAAVFTVSAGAFPIAPQAHFPLLDDWSNPALSSTLMNAATTADVRQHILDTAKPIMLCKGFAGVGLNEILAAAGVPKGSFYHYFGSKEAFGESILESYFDDYVAHLDELLVRGPGAAIDRLMRYWTQWQQMQMGNDPEGKCLVVKLGAEVCDLSEAMRAALERGTSQIVARLAACIAAALDDGSLKVDLEPQQTAAMLYELWVGATLIEKIRRDGEPLAVAMASTRRVLGLTGAR

SEQ ID NO: 156438 - DNA, 600 bp, Salmonella enterica
  subsp. enterica serovar Schwarzengrund str. CVM19633
  CDS (1)..(600): transl_table=11
atgaataagcaaaccgaacacgatacccgcgaacatctgctggccaccggcgagcagctttgtatgcaacggggttttaccggcatggggcttagcgagttgctcaaaaccgcccaggtgcctaaagggtcgttttatcactactttcgctcgaaagaagccttcggcgtcgccatgcttgaacgacattacgcctgctatcatcagcgtcttacggcgcacttcacctccggtcccggtaatcatcgcgatcgtcttctcgcctggtatcaggaaacgttaaagcagttttgccagcaaggcaccatcagcggttgcctgacggtgaaactgtcagcggaagtctgcgatctgtcggaggatatgcgctctacgatggataaaggggcgcaggagatcatggcactgcttgcacgcgcgctggaagatggccgtaatagccactgtttacatttcaccggccagccgttgccgcaggcgcaggtactttatgccctgtggctgggcgccaatttgcaggccaaaatatcccgtagcgccgcgccactggaaaatgcgttggcgcatgttaagaccatcattgcaacgcctgagctgtaa

SEQ ID NO: 156439 - protein, 199 aa, Salmonella enterica
  subsp. enterica serovar Schwarzengrund str. CVM19633
MNKQTEHDTREHLLATGEQLCMQRGFTGMGLSELLKTAQVPKGSFYHYFRSKEAFGVAMLERHYACYHQRLTAHFTSGPGNHRDRLLAWYQETLKQFCQQGTISGCLTVKLSAEVCDLSEDMRSTMDKGAQEIMALLARALEDGRNSHCLHFTGQPLPQAQVLYALWLGANLQAKISRSAAPLENALAHVKTIIATPEL

SEQ ID NO: 156440 - DNA, 621 bp, Burkholderia cenocepacia J2315
  CDS (1)..(621): transl_table=11
atgaatgcatcttcaggcgccgaagtccgccagcacatcctgaacatcgcgaagccgatcatgctccacaaggggttttcggcggtcggtctgaacgagattctcgccgcggcgggcatcccgaagggctcgttctaccattacttcggctcgaaagaggcattcggcgaagcgctgctcgaatcgtatttcgaaggctatctcgcgcatctcgacaacctgctcaagcaccaggccggcacgggcgccgagcgcctgatgacgtactggggcaattggctgcacacgcaatgcgcggacgatccggaaggcaagtgcctcgcggtgaagctcggcgcggaagtgtcggatctgtcggaagcgatgcgcgcggtattgcggcgcggcaccagccagatcatcgagcggctcgcgggcggcatcgaaggcgggctcgccgacgggtcgctgagcggcgtcgacgatccgtcgtacacggccgcgatcctgtacgagctgtggctgggcgcgacgctgctggaaaagattcaccgcaaccgcaaaccgctcgaaagggcgatggccgaaacgcggcgcatgctgaacctgccgccggccgcacacgacggagcgcagtcgtaa

SEQ ID NO: 156441 - protein, 206 aa, Burkholderia cenocepacia J2315
MNASSGAEVRQHILNIAKPIMLHKGFSAVGLNEILAAAGIPKGSFYHYFGSKEAFGEALLESYFEGYLAHLDNLLKHQAGTGAERLMTYWGNWLHTQCADDPEGKCLAVKLGAEVSDLSEAMRAVLRRGTSQIIERLAGGIEGGLADGSLSGVDDPSYTAAILYELWLGATLLEKIHRNRKPLERAMAETRRMLNLPPAAHDGAQS

SEQ ID NO: 156442 - DNA, 600 bp, Klebsiella pneumoniae 342
  CDS (1)..(600): transl_table=11
atgaacagacacagcgaatgcgatacccgagaacatatcctggtcaccggcgagcagctctgcatgcatcgcggttttaccggaatgggcttgagcgaacttctgaagacggcggaagtgcctaagggctctttctaccattacttccgctctaaagaagccttcggcgtcgcgctgctcgaacatcactacaccggatatctgcagcgcctggtcgaccacttcgatcatggcgacggcaactatcgtgaccgcctgctggcttattatcagcacacgctgaatcagttctgccagcaggggattattagcggctgtcttaccgtcaagttgtcggcagaggtttgcgacctgtcggaagatatgcgtaccgccatggaccatggtgccagtcagattatcgccctgctgggcgacgcgctggagaaaggacgtcaggaaggcagtctggcgtttgacggcgaggccatgaccctgtcgcaggtgctgtattccctgtggctcggggccaacctgcaggccaaaattacgcgtagcgcaaggccgctggaaagcgcccttgcccacgccaaacagattattgcggcgcctgcggtataa

SEQ ID NO: 156443 - protein, 199 aa, Klebsiella pneumoniae 342
MNRHSECDTREHILVTGEQLCMHRGFTGMGLSELLKTAEVPKGSFYHYFRSKEAFGVALLEHHYTGYLQRLVDHFDHGDGNYRDRLLAYYQHTLNQFCQQGIISGCLTVKLSAEVCDLSEDMRTAMDHGASQIIALLGDALEKGRQEGSLAFDGEAMTLSQVLYSLWLGANLQAKITRSARPLESALAHAKQIIAAPAV

SEQ ID NO: 156444 - DNA, 600 bp, Escherichia coli O127:H6 str. E2348/69
  CDS (1)..(600): transl_table=11
atgaacaaacacaccgaacatgatactcgcgaacatctcctggcgacgggcgagcaactttgcctgcaacgtggattcaccgggatggggctaagcgaactcctaaaaaccgctgaagtgccgaaagggtccttctatcactactttcgttctaaagaagcgtttggcgttgccatgcttgagcgccattacgccgcatatcaccagcgactgactgagttgctgcaatccggcgaaggtaactaccgcgaccgcatactgacttattaccagcaaacactgaaccagttttgccaacatggaactatcagtggttgcctgacagtaaaactctctgccgaagtgtgcgatctgtcagaagatatgcgcagcgcaatggataaaggggctcgcggcgtgatcgccctgctctctcaggcgctggaaaatggccgtgagaaccattgtttaaccttttgtggcgaaccgctgcaacaggcacaagtgctttacgcactgtggcttggcgcgaatctgcaggccaaaatttcgcgcagtttcgagccactggaaaacgcgctggcccatgtaaaaaacattattgcgacgcctgccgtttag

SEQ ID NO: 156445 - protein, 199 aa, Escherichia coli O127:H6 str. E2348/69
MNKHTEHDTREHLLATGEQLCLQRGFTGMGLSELLKTAEVPKGSFYHYFRSKEAFGVAMLERHYAAYHQRLTELLQSGEGNYRDRILTYYQQTLNQFCQHGTISGCLTVKLSAEVCDLSEDMRSAMDKGARGVIALLSQALENGRENHCLTFCGEPLQQAQVLYALWLGANLQAKISRSFEPLENALAHVKNIIATPAV

SEQ ID NO: 156446 - DNA, 516 bp, Escherichia fergusonii ATCC 35469
  CDS (1)..(516): transl_table=11
atggggctaagcgaattactaaaaactgctgaagtgccgaaagggtccttctatcactactttcgctctaaagaagcgtttggcgttgccatgcttgagcgccattacgccgcatatcacctgcgactgactgagttgctgcaatccggcgaaggtaactaccgcgaccgcatactggcttattaccagcaaacactgaaccagttttgccaacatggaaccatcagtggttgcctgacagtaaaactctctgccgaagtgtgcgatctgtcagaagatatgcgcagcgcgatggataaaggggctcgcggcgtgatcgccctgctctctcaggcgctggaaaatggccgtgagaaccattgtttaaccttttgtggcgaaccgctgcaacaggcacaagtgctttacgcactgtggcttggcgcgaatttgcaggccaaaatttcgcgcagtttcgagccactggaaaacgcgctggcccatgtaaaaaccattattgcgacgcctgccgtttag

SEQ ID NO: 156447 - protein, 171 aa, Escherichia fergusonii ATCC 35469
MGLSELLKTAEVPKGSFYHYFRSKEAFGVAMLERHYAAYHLRLTELLQSGEGNYRDRILAYYQQTLNQFCQHGTISGCLTVKLSAEVCDLSEDMRSAMDKGARGVIALLSQALENGRENHCLTFCGEPLQQAQVLYALWLGANLQAKISRSFEPLENALAHVKTIIATPAV

SEQ ID NO: 156448 - DNA, 654 bp, Vibrio splendidus LGP32
  CDS (1)..(654): transl_table=11
atggaatatacctcaaaaagccgaagactagacgactggtctaatttaacttatagtaagcccatgaacgataaaacgaacgacacacgcctgcatgttttagatgttggctaccaattaatagtgaacaacggctttaacggcgttggcttatcgcaattgcttaaagaagcggatgttccaaaaggatcgttttaccactactttaaatctaaagagcaatttggcgaggctctgatccagcactattttgagacctacatcagcagagttgaaactattttggttcatggtgaaggcaaccattaccagagaattatcagttatttcactcgatggtcacagattgaaaacggtacttgtaacgctcataaatgcttagtcgttaagctcagcgccgaagtttctgatctttctgatcctatgcgccaagcgctattgaaaggtgctgagaaagtgacgcataccatcgagcagtgcattgtcggtggtattgatgatggctcgataaagcttgaagagagccaagaaaccgctcaaaatctatattctatgtggttaggcgcaagcttattaagcaaactaagccagagttcacgtagcttagaatcagctttaaacctaacccaacagattttaaaaggtaaaaactaa

SEQ ID NO: 156449 - protein, 217 aa, Vibrio splendidus LGP32
MEYTSKSRRLDDWSNLTYSKPMNDKTNDTRLHVLDVGYQLIVNNGFNGVGLSQLLKEADVPKGSFYHYFKSKEQFGEALIQHYFETYISRVETILVHGEGNHYQRIISYFTRWSQIENGTCNAHKCLVVKLSAEVSDLSDPMRQALLKGAEKVTHTIEQCIVGGIDDGSIKLEESQETAQNLYSMWLGASLLSKLSQSSRSLESALNLTQQILKGKN

SEQ ID NO: 156450 - DNA, 516 bp, Escherichia coli 55989
  CDS (1)..(516): transl_table=11
atggggctaagcgaattactaaaaaccgctgaagtgccgaaagggtccttctatcactactttcgctctaaagaagcgtttggcgttgccatgcttgagcgtcattacgccgcatatcaccagcgactgactgagttgctgcaatccggcgaaggtaactaccgcgaccgcatactggcttattaccagcaaacactgaaccagttttgccaacatggaaccatcagtggttgcctgacagtaaaactctctgccgaagtgtgcgatctgtcagaagatatgcgcagcgcgatggataaaggtgctcgcggcgtgatcgccctgctctctcaggcgctggaaaatggccgtgagaaccattgtttaaccttttgtggcgaaccgctacaacaggcacaagtgctttacgcactgtggcttggcgcgaatctgcaggccaaaatttcgcgcagtttcgtgccactggaaaacgcgctggcccatgtaaaaaacattattgcgacgcctgccgtttag

SEQ ID NO: 156451 - protein, 171 aa, Escherichia coli 55989
MGLSELLKTAEVPKGSFYHYFRSKEAFGVAMLERHYAAYHQRLTELLQSGEGNYRDRILAYYQQTLNQFCQHGTISGCLTVKLSAEVCDLSEDMRSAMDKGARGVIALLSQALENGRENHCLTFCGEPLQQAQVLYALWLGANLQAKISRSFVPLENALAHVKNIIATPAV

SEQ ID NO: 156452 - DNA, 516 bp, Escherichia coli UMN026
  CDS (1)..(516): transl_table=11
atggggctaagcgaattactaaaaaccgctgaagtgccgaaagggtccttctatcactactttcgctctaaagaagcgtttggcgttgccatgcttgagcgccattacgccgcatatcaccagcgactgactgagttgctgcaatccggcgaaggtaactaccgcgaccgcatactggcttattaccagcaaacactgaaccagttttgccaacatggaaccatcagtggttgcctgacagtaaaactctctgccgaagtgtgcgatctgtcagaagatatgcgtagcgcgatggataaaggcgctcgcggcgtgatcgttctgctctcgcaggcgctggaaaatggccgtgatagccattgtttaaccttttgtggcgaaccgctgcaacaggcacaagtgctttacgcactatggctgggtgcgaatctgcaggccaaaatttcgcgcaattccgagccactggaaaacgcgctggcacatgtaaaaaccattattgcgacgcctgccgtttag

SEQ ID NO: 156453 - protein, 171 aa, Escherichia coli UMN026
MGLSELLKTAEVPKGSFYHYFRSKEAFGVAMLERHYAAYHQRLTELLQSGEGNYRDRILAYYQQTLNQFCQHGTISGCLTVKLSAEVCDLSEDMRSAMDKGARGVIVLLSQALENGRDSHCLTFCGEPLQQAQVLYALWLGANLQAKISRNSEPLENALAHVKTIIATPAV

SEQ ID NO: 156454 - DNA, 609 bp, Alcanivorax sp. DG881
  CDS (1)..(609): transl_table=11
atgaacacacaaaccgccatcgatcagccagacaaacacctcgacacccgccagcacctgctggatacgggtcgcgatattctggctgcccgcggtttcagctccgtcggcttgagcgccatcctgcaagcggccggcgtgccgaagggctcgttctaccactactttcagtccaaagagcaatttggccaggcgttgctggaagattattttgccagctacgtacaagacctggatgcccgcttcgccgatgacggcaccccggccatcagtcggctgatgcagtactggcaggactggcaggaaaactactgcggccccgccggcctgcgcgattgcctggtggtcaaactgagcgccgaagtggccgacctgtccgaagccatgcgcatcaccctgcgtgatggtaccgagcaagtcatggcgcgcattgccaactgcatcgacgccgccattgccgatggctccctgcatccgcagccagcccagcagaccgccggcaacctgtaccagctatggctgggcgccagcctgctgaccaagctgcaccgcaatacgcagcccatgaatcaggccatgacgctgacccagagcatgctcgcacgctga

SEQ ID NO: 156455 - protein, 202 aa, Alcanivorax sp. DG881
MNTQTAIDQPDKHLDTRQHLLDTGRDILAARGFSSVGLSAILQAAGVPKGSFYHYFQSKEQFGQALLEDYFASYVQDLDARFADDGTPAISRLMQYWQDWQENYCGPAGLRDCLVVKLSAEVADLSEAMRITLRDGTEQVMARIANCIDAAIADGSLHPQPAQQTAGNLYQLWLGASLLTKLHRNTQPMNQAMTLTQSMLAR

SEQ ID NO: 156456 - DNA, 645 bp, Burkholderia pseudomallei K96243; identical to SEQ ID NO: 25714
  CDS (1)..(645): transl_table=11

SEQ ID NO: 156457 - protein, 214 aa, Burkholderia pseudomallei K96243; identical to SEQ ID NO: 25715

SEQ ID NO: 156458 - DNA, 612 bp, Idiomarina loihiensis L2TR
  CDS (1)..(612): transl_table=11
atgcaacgaacaaaaaaagcggcaaccaaacgccagcatattcttgagacggggtaccggttggtacttaaaaaaggctttgctgcggtggggttgcaggaaattcttaagagttgtggtatcccaaaaggttccttctatcattattttccatcgaaggaagcctttggttgcgagttgttgaaagagtacaccaatgattacggatgtaagtttgagcagctgcttacggcatcgggtagtggccgagacaatttaatgcgttactgggatgcctggatagctgaccctgatgacccgacacgtggttgggcggaagagtgtctggtggtgaagcttgcggctgaggttgcagacatgtctgagactatgcggcagatcctggatgatggcgtgcagcagctcatagtaaagattgcgactttgattgagaatggtcgtagtgatggctcgctagctgatggagctcctccccttcaattggctcggatgctttaccagatgtggatgggtgcggcattgctcgctaaattaagccaggacaaggaacctctacatgaagcgcggaattcaactcttctaatgctggattgcagcgatactaaggcttaa

SEQ ID NO: 156459 - protein, 203 aa, Idiomarina loihiensis L2TR
MQRTKKAATKRQHILETGYRLVLKKGFAAVGLQEILKSCGIPKGSFYHYFPSKEAFGCELLKEYTNDYGCKFEQLLTASGSGRDNLMRYWDAWIADPDDPTRGWAEECLVVKLAAEVADMSETMRQILDDGVQQLIVKIATLIENGRSDGSLADGAPPLQLARMLYQMWMGAALLAKLSQDKEPLHEARNSTLLMLDCSDTKA

SEQ ID NO: 156460 - DNA, 537 bp, Salmonella enterica
  subsp. enterica serovar Choleraesuis str. SC-B67
  CDS (1)..(537): transl_table=11
atgcaacggggttttaccggcatggggcttagcgaattgctcaaaaccgcccaggtgcctaaagggtcgttttatcactactttcgctcgaaagaagccttcggcgtcgccatgcttgagcgacattacgcctgctatcatcagcgtcttacggcgcacttcacctccggtcccggtaatcatcgcgatcgccttctcgcctggtatcaggaaacgttaaagcagttttgccagcaaggcgccatcagcggttgcctgacggtgaaactgtcagcggaggtctgcgatctgtcggaggatatgcgctctacgatggataaaggggcgcaggagatcatggcactgcttgcacgcgcgctggaagatggccgtaatagccactgtttacatttcaccggccagccgttgccacaggcgcaggtactttatgccctgtggctgggcgccaatttgcaggccaaaatatcccgtagcgccgcgccgctggaaaatgcgttggcgcatgttaagaccatcattgcaacgcctgagcagtaa

SEQ ID NO: 156461 - protein, 178 aa, Salmonella enterica
  subsp. enterica serovar Choleraesuis str. SC-B67
MQRGFTGMGLSELLKTAQVPKGSFYHYFRSKEAFGVAMLERHYACYHQRLTAHFTSGPGNHRDRLLAWYQETLKQFCQQGAISGCLTVKLSAEVCDLSEDMRSTMDKGAQEIMALLARALEDGRNSHCLHFTGQPLPQAQVLYALWLGANLQAKISRSAAPLENALAHVKTIIATPEQ

SEQ ID NO: 156462 - DNA, 639 bp, Psychrobacter arcticus 273-4; identical to SEQ ID NO: 25720
  CDS (1)..(639): transl_table=11

SEQ ID NO: 156463 - protein, 212 aa, Psychrobacter arcticus 273-4; identical to SEQ ID NO: 25721

SEQ ID NO: 156464 - DNA, 600 bp, Shigella sonnei Ss046
  CDS (1)..(600): transl_table=11
atgaacaaacacaccgaacatgatactcgcgaacatctcctggcgacgggcgagcaactttgcctgcaacgtgggttcaccgggatggggctaagcgaattactaaaaatcgctgaagtgccgaaagggtccttctatcactactttcgctctaaagaagcgtttggcgttgctatgcttgagcgccattacgccacatatcaccagcgactgactgagttgctgcaatccggcgaaggtaactaccgcgaccgcatactggcttattaccagcaaacactgaaccagttttgccaacatggaaccatcagtggttgcctgacagtaaaactctctgccgaagtgtgcgatctgtcagaagatatgcgtagcgcgatggataaaggcgctcgcggcgtgattgccctgctctctcaggcgctggaaaatggccatgagaaccactgtttaaccttttgtggcgaaccgctgcaacaggcacaagtgctttacgcactatggctgggtgcgaatctgcaggccaaaatttcgcgcaattccgagccactggaaaacgcgctggcacatgtaaaaaccattattgcgacgcctgccgtttag

SEQ ID NO: 156465 - protein, 199 aa, Shigella sonnei Ss046
MNKHTEHDTREHLLATGEQLCLQRGFTGMGLSELLKIAEVPKGSFYHYFRSKEAFGVAMLERHYATYHQRLTELLQSGEGNYRDRILAYYQQTLNQFCQHGTISGCLTVKLSAEVCDLSEDMRSAMDKGARGVIALLSQALENGHENHCLTFCGEPLQQAQVLYALWLGANLQAKISRNSEPLENALAHVKTIIATPAV

SEQ ID NO: 156466 - DNA, 744 bp, Burkholderia pseudomallei 1710b
  CDS (1)..(744): transl_table=11
ttgcgttggcgctcgcgtgcgccgattccgccggcgtgcgccgccgttttcaccgtgtctgccggcgcattccctatcgcgccccaggcccattttccgttgctagacgactggtctaatcccgcgctatcatccaccctcatgaacgccgcaaccaccgccgacgtccggcagcacattctcgacaccgccaagcccatcatgctctgcaagggcttcacgggcgtcggcctgaacgagatcctggcggcggccggcgtcccgaaggggtcgttctaccattatttcgggtcgaaagaggcgttcggcgaatcgattctcgaatcgtatttcgacgattacgtcgcgcatctcgacgaactgctcgtgcgcggccccggcgccgcgatcgatcggttgatgcgctactggacccagtggcagcagatgcagatgggcaacgaccccgaaggcaagtgcctcgtcgtcaagctcggcgccgaggtgtgcgatctgtcggaggcgatgcgcgcggcgctcgagcgcggcacgtcgcagatcgtcgcgcggctcgccgcgtgcatcgcggcggcgctcgacgacggctcgctgaaggtcgatctcgagccgcagcagacggccgcgatgctgtacgagctgtgggtcggcgcgacgctcatcgagaagatccggcgcgacggcgagccgctcgccgtcgcgatggcgagcacgcgccgggtcctcggtctgacgggcgcgcgttga

SEQ ID NO: 156467 - protein, 247 aa, Burkholderia pseudomallei 1710b
MRWRSRAPIPPACAAVFTVSAGAFPIAPQAHFPLLDDWSNPALSSTLMNAATTADVRQHILDTAKPIMLCKGFTGVGLNEILAAAGVPKGSFYHYFGSKEAFGESILESYFDDYVAHLDELLVRGPGAAIDRLMRYWTQWQQMQMGNDPEGKCLVVKLGAEVCDLSEAMRAALERGTSQIVARLAACIAAALDDGSLKVDLEPQQTAAMLYELWVGATLIEKIRRDGEPLAVAMASTRRVLGLTGAR

SEQ ID NO: 156468 - DNA, 585 bp, Pseudomonas fluorescens Pf0-1
  CDS (1)..(585): transl_table=11
atgaaaccgacctacgacgacacccgccaacatttgctcgacaccggccaccggatgatggccgagaaaggcttcaccagtgtcggcctgaacgagatcctgcagaccgccggcgtgcccaagggctcgttctatcactacttcaaatccaaggaactgtacggccaggccctgctcgaggattacttcgtcgactatctggccgacatggagcgacgcctgacgctgcccggcctgagcgcccatgagcggctgatggattactggcagggctggcaggatcgctgcactctggaaggccatggcgacgaatgccttgtggtgaaactcagtgctgaggtggctgacctttccgaaaccatgcgcctgaccttgcgtgatggtgcagagcgagtggtggcgcgcatcagcgagtgcatcgagcagggccaggtcgaaaaaagcttgcctgagggcgatgctcggcaactggctgaaaccctgtatcaactgtggctgggggccagtctgctgaacaaactgcaacgcacagggcaatcgttgagtacgtcgatggcgaccacgaagcgcctgttgagcgtgtga

SEQ ID NO: 156469 - protein, 194 aa, Pseudomonas fluorescens Pf0-1
MKPTYDDTRQHLLDTGHRMMAEKGFTSVGLNEILQTAGVPKGSFYHYFKSKELYGQALLEDYFVDYLADMERRLTLPGLSAHERLMDYWQGWQDRCTLEGHGDECLVVKLSAEVADLSETMRLTLRDGAERVVARISECIEQGQVEKSLPEGDARQLAETLYQLWLGASLLNKLQRTGQSLSTSMATTKRLLSV

SEQ ID NO: 156470 - DNA, 600 bp, Shigella dysenteriae Sd197
  CDS (1)..(600): transl_table=11
atgaacaaacacaccgaacatgatactcgcgaacatctcctggcgatgggcgagcaactttgcctgcaacgtggattcaccgggatggggctaagcgaattactaaaaaccgctgaagtgccgaaagggtccttctatcactactttcgctctaaagaagcgtttggcgtagccatgcttgagcgccattacgccgcatatcaccagcgactgactgagttgctgcaatccggcgaaggtaactaccgcgaccgcatactggcttattaccagcaaacactgaaccagttttgccaacatggaaccatcagtggttgcctgacagtaaaactctctgccgaagtgtacgatctgtcagaagatatgcgtagcgcgatggataaaggcgctcgcggcgtgatcgccctgctctcgcaggctctggaaaatggccgtgatagccattgtttaaccttttgtggcgaaccgctgcaacaggcacaagtgctttacgcactatggctgggtgcgaatctgcaggccaaaatttcgcgcaattccgagccactggaaaacgcgctagcacatgtaaaaaccattattgcgacgcctgccgtttag

SEQ ID NO: 156471 - protein, 199 aa, Shigella dysenteriae Sd197
MNKHTEHDTREHLLAMGEQLCLQRGFTGMGLSELLKTAEVPKGSFYHYFRSKEAFGVAMLERHYAAYHQRLTELLQSGEGNYRDRILAYYQQTLNQFCQHGTISGCLTVKLSAEVYDLSEDMRSAMDKGARGVIALLSQALENGRDSHCLTFCGEPLQQAQVLYALWLGANLQAKISRNSEPLENALAHVKTIIATPAV

SEQ ID NO: 156472 - DNA, 600 bp, Shigella boydii Sb227
  CDS (1)..(600): transl_table=11
atgaacaaacacaccgaacatgatactcgcgaacatctcctggcgacgggcgagcaactttgcctgcaacgtggattcaccgggatggggctaagcgaattactaaaaaccgctgaagtgccgaaagggtccttctatcactactttcgctctaaagaagcgtttggcgttgccatgcttgagcgtcattacaccgcatatcaccagcgactgactgagttgctgcaatccggcgaaggtaactaccgcgaccgcatactggcttattaccagcaaacactgaaccagttttgccaacatggaaccatcagtggttgcctgacagtaaaactctctgccgaagtgtgcgatctgtcagaagatatgcgcagcgcgatggataaaggtgctcgcggcgtgatcgccctgctctctcaggcgctggaaaatggccgtgagaaccattgtttaaccttttgtggcgaaccgctacaacaggcacaagtgctttacgcactatggctgggtgcgaatctgcaggccaaaatttcgcgcagtttcgagccactggaaaacgcgctggcccatgtaaaaaacattattgcgacgcctgccgtttag

SEQ ID NO: 156473 - protein, 199 aa, Shigella boydii Sb227
MNKHTEHDTREHLLATGEQLCLQRGFTGMGLSELLKTAEVPKGSFYHYFRSKEAFGVAMLERHYTAYHQRLTELLQSGEGNYRDRILAYYQQTLNQFCQHGTISGCLTVKLSAEVCDLSEDMRSAMDKGARGVIALLSQALENGRENHCLTFCGEPLQQAQVLYALWLGANLQAKISRSFEPLENALAHVKNIIATPAV

SEQ ID NO: 156474 - DNA, 936 bp, Burkholderia thailandensis E264
  CDS (1)..(936): transl_table=11
atgatgcacattcaacatcacgaatggaatgaccgtttactgatgcagagccgacgtctggccgtccaggcaactccgcgagcgaatggcgcttctggccgtttcccgccagacaaaacaatcgccgaaacgatactgttctgcacgcttcgcaatcggttggccgccaatggacacggacaggaaaaaacgcgaagccccaacgcggttcgcgcgggcatcgacatctcgtcccaccgtttccgcctccaaactcatcccacaccgttcccagggccaatcctcccgtcactagacgaccggtctaattcgacgctatcatccaccaccatgaacgccgcaaccaccaccgccgatgtccggcagcacattctcgacaccgccaagcccatcatgctctgcaagggcttcacgggcgtcgggctgaacgagattctggcggcagccggcgtcccgaaggggtcgttctatcactatttcgggtcgaaggaggcgttcggcgagtcgatactcgaatcgtatttcgacgactaccttgctcacctcgacgagttgctcgtgcgtggccccggcaccgcaatcgacaggctgatgcgctattggacccaatggcagcaaatgcagatgggcgacgaccccgaaggcaagtgcctcgtcgtcaagctgggcgccgaagtctgcgatctgtcggaagcgatgcgcgcggcgctcgagcgcggcacgtcgcagattgtcgcgcggctcgccgcatgcatcgcggcggcattcgacgacggctcgctgaaagccgaactcgatccgcagcagacggccgagatgctgtacgagctatggatcggcgcgacgctgatcgaaaagatccggcgcaacggcgagccgctggcggtcgcgatggcgagcacccgtcgcgccctcggcctgccgggagcgcgctga

SEQ ID NO: 156475 - protein, 311 aa, Burkholderia thailandensis E264
MMHIQHHEWNDRLLMQSRRLAVQATPRANGASGRFPPDKTIAETILFCTLRNRLAANGHGQEKTRSPNAVRAGIDISSHRFRLQTHPTPFPGPILPSLDDRSNSTLSSTTMNAATTTADVRQHILDTAKPIMLCKGFTGVGLNEILAAAGVPKGSFYHYFGSKEAFGESILESYFDDYLAHLDELLVRGPGTAIDRLMRYWTQWQQMQMGDDPEGKCLVVKLGAEVCDLSEAMRAALERGTSQIVARLAACIAAAFDDGSLKAELDPQQTAEMLYELWIGATLIEKIRRNGEPLAVAMASTRRALGLPGAR

SEQ ID NO: 156476 - DNA, 591 bp, Shewanella denitrificans OS217
  CDS (1)..(591): transl_table=11
atgaaaaccagtacccaagatacacgccaacacattttagacacaggctatcaattgatagcctgtcgtggttttgtgagtgtcggcctgtccgaattacttaaccatgcccaagtacctaagggatctttttaccactatttcaaatctaaagagcagttcggtgaagcccttattgagtattacttcgataattaccaacaacaactccacagccaatttgctaatctagaaggttcagcctacgacagattgatgaactattggcagtgctggatgacttcccaagctgacaactattcatctcagaaatgcctagtggtaaaactgagcgccgaagtggccgatttatcagaacctatgcgcatcgccctattaaaaggcacgcaaatcgttcagctggctatcagcgactgcattaaagcgggcattacagatggaagcattaaagagacgaattctgatgacacagctaaactgctttatcatttgtggattggcgcaagtttaatggcaaaactcagtaaaacagattcaggattacaacaagcaatggccaccactgaattactattgaaacctggcggctaa

SEQ ID NO: 156477 - protein, 196 aa, Shewanella denitrificans OS217
MKTSTQDTRQHILDTGYQLIACRGFVSVGLSELLNHAQVPKGSFYHYFKSKEQFGEALIEYYFDNYQQQLHSQFANLEGSAYDRLMNYWQCWMTSQADNYSSQKCLVVKLSAEVADLSEPMRIALLKGTQIVQLAISDCIKAGITDGSIKETNSDDTAKLLYHLWIGASLMAKLSKTDSGLQQAMATTELLLKPGG

SEQ ID NO: 156478 - DNA, 621 bp, Burkholderia ambifaria AMMD
  CDS (1)..(621): transl_table=11
atgaatgcatcttcaggcgcggaagtccgccatcacatcctgaataccgcgaagccgatcatgctccagaaggggttctcggcggtcggtctgaacgagattctcgccgcggcgggcatcccgaagggctcgttctaccattacttcggctcgaaggaagcattcggcgaggcgctgctcgagtcgtatttcgaaggctatctcgcgtatctcgacaacctgttcaagcatcaggccggcacgggcgcgcagcgcctgatgatgtactggaacaactggctgcagatgcagtgcgcggacgatccggaaggcaagtgcctcgcggtcaagctgggtgcggaggtgtccgacttgtcggagccgatgcgcgcggtgctgcggcgcggcacgagccagatcatcgagcggctcgcgggcgggatcgaggccgggctggccgacggttcgctgcgcggcgtcgacgatcccgcgcatacggccgcgatcctgtacgagctttggcttggcgcaacgctgctggagaagatccaccgcaaccgccagccgctcgagcgcgcgatgctcgaaacccgacggatgctgaacctgccgcccgtcgagccagacggagcgcagtcataa

SEQ ID NO: 156479 - protein, 206 aa, Burkholderia ambifaria AMMD
MNASSGAEVRHHILNTAKPIMLQKGFSAVGLNEILAAAGIPKGSFYHYFGSKEAFGEALLESYFEGYLAYLDNLFKHQAGTGAQRLMMYWNNWLQMQCADDPEGKCLAVKLGAEVSDLSEPMRAVLRRGTSQIIERLAGGIEAGLADGSLRGVDDPAHTAAILYELWLGATLLEKIHRNRQPLERAMLETRRMLNLPPVEPDGAQS

SEQ ID NO: 156480 - DNA, 585 bp, Pseudomonas aeruginosa UCBPP-PA14
  CDS (1)..(585): transl_table=11
atgaaacccagctacgacgacacccgccagcatctgctcgataccggataccggatcatggcggtcaaaggcttctccggcgtcggcctcaacgaaatcctgcagaccgcgggcgttcccaagggctcgttctaccattacttcaaatccaaggaacagttcggccaggccctgctggaggactacttccgcgtctacctggcggacatggaccaacgcttctccgcgccagggctgaatgcccgcgaacgactgatgagttactggcagaagtggctggacaacgcctgcccgccctgcgacgagcagcgctgcctggtggtcaagctcagcgccgaggtcgcggacctttcggaaagcatgcgcatcaccctgcgcgacggctccgacgggatcatcgaacgcctggtcggctgcctcgggcagggccgcgacgacggctccctcgcgccctgcgatgcccggcacatggccagcgcgctgtaccagttgtggctcggcgcgagcctgctgagcaagctgcaccgcagcccgggaccgctggaaacagccatgcagaccacccgcagcctgctggaaatctga

SEQ ID NO: 156481 - protein, 194 aa, Pseudomonas aeruginosa UCBPP-PA14
MKPSYDDTRQHLLDTGYRIMAVKGFSGVGLNEILQTAGVPKGSFYHYFKSKEQFGQALLEDYFRVYLADMDQRFSAPGLNARERLMSYWQKWLDNACPPCDEQRCLVVKLSAEVADLSESMRITLRDGSDGIIERLVGCLGQGRDDGSLAPCDARHMASALYQLWLGASLLSKLHRSPGPLETAMQTTRSLLEI

SEQ ID NO: 156482 - DNA, 597 bp, Shewanella sp. ANA-3; identical to SEQ ID NO: 25744
  CDS (1)..(597): transl_table=11

SEQ ID NO: 156483 - protein, 198 aa, Shewanella sp. ANA-3; identical to SEQ ID NO: 25745

SEQ ID NO: 156484 - DNA, 591 bp, Shewanella amazonensis SB2B
  CDS (1)..(591): transl_table=11
atgaataccaaaacccaagacacccggcaacacatactcgacataggctaccaactggtggtcaacaaaggctttgccggtgtgggcctgtcggaactgctgaaaaccgccgaggtgcccaagggctccttctatcactacttcaagtccaaggagcagtttggcgaagcccttatccaggcatatttcagcgagtacctgcgtcaactgaaccagttgctggagacggctccgggtaaccagtatcaaaaactgatgcactactggcagcattggagcgagcaaaacagctgtcagggtcaggctggaaagtgcctggtagtcaagcttgccggtgaggtatcagacttatccgagcccatgcgcctggccctcctcactggcaccaatcgcatcatagagcgggtggccgagtgtcttgaaaaggcccggactgctggcgagataagcatcagtaatagccgccagacagcagagcagctgtacaacctgtggattggcgccagtttgctgaacaagatacgtttggacgatgccagcctgcagcaggcactgctgaccaccagacaggtattacagccaacggcctga

SEQ ID NO: 156485 - protein, 196 aa, Shewanella amazonensis SB2B
MNTKTQDTRQHILDIGYQLVVNKGFAGVGLSELLKTAEVPKGSFYHYFKSKEQFGEALIQAYFSEYLRQLNQLLETAPGNQYQKLMHYWQHWSEQNSCQGQAGKCLVVKLAGEVSDLSEPMRLALLTGTNRIIERVAECLEKARTAGEISISNSRQTAEQLYNLWIGASLLNKIRLDDASLQQALLTTRQVLQPTA

SEQ ID NO: 156486 - DNA, 603 bp, Yersinia mollaretii ATCC 43969
  CDS (1)..(603): transl_table=11
atgaacaaaatacagcacacacatgtcgatacccgtgagcacctgctagccactggcgagagtctcagtctgcgccttggctttaatggcatggggcttagcctgttactcaccacggcgggtattccgaaaggctcgttctatcactatttccgctcgaaggaagtgtttggtgaggcgatgctacaacgctattttgatcgttatgatgcggcaatggaaaatctgctcaccggctcgcaaggcgataagcgccaccatttgctgcactattttgctcagtctattgctaactattgtggcagtgaatgccacaatgcttgtctggcggttaaactctcagccgaagtgagtgatttatccgaacccatgcgccatgcgctggatatcggcactgcccgtgtgattggacgtttgcaagatgccatcgaagccggtattgccgagggttcactgcgcaccctgctctccccggccgccaccgcagaaacactctatgccttgtggctaggtgcagcattgcgggcgaaggtaaaacgttctgttacaccgctgacctgtgcgctagaaagtatcgaactgatgctacaaccgacccaataa

SEQ ID NO: 156487 - protein, 200 aa, Yersinia mollaretii ATCC 43969
MNKIQHTHVDTREHLLATGESLSLRLGFNGMGLSLLLTTAGIPKGSFYHYFRSKEVFGEAMLQRYFDRYDAAMENLLTGSQGDKRHHLLHYFAQSIANYCGSECHNACLAVKLSAEVSDLSEPMRHALDIGTARVIGRLQDAIEAGIAEGSLRTLLSPAATAETLYALWLGAALRAKVKRSVTPLTCALESIELMLQPTQ

SEQ ID NO: 156488 - DNA, 600 bp, Yersinia frederiksenii ATCC 33641
  CDS (1)..(600): transl_table=11
atgaacaaaatacaacatgcacatgtagatacccgcgagcatctattggcaacgggcgagagtctcagcctgcacctcggcttcaatggtatgggccttagccagttacttaccactgcgggtattccgaaagggtcgttttatcactacttccgttcaaaagaagttttcggtgaggcgatgctacagcgttattttgatcgttacgatgctgcgatggaaagcttattaacccagccgcaaggggataaacgccaccatctactgcactattttgctcaatctattgctaactattgtggcagtgaatgccacaatgcttgtctggcggttaaactatcagccgaagtgagtgatttatccgaaccgatgcgtcacgcgttggatatcggcactgctcgcgtcattggtcgtttacaagatgccatcgaagccggtattgaagagggttcgctgcgtatcacactttcccccgccgcaaccgcagaaacactctatgccttgtggctgggtgcttcattgcgagccaaggtgaaacgatcagtgactccgctgacttgtgcgctggaaagtattgaattgattttacaacccacttaa

SEQ ID NO: 156489 - protein, 199 aa, Yersinia frederiksenii ATCC 33641
MNKIQHAHVDTREHLLATGESLSLHLGFNGMGLSQLLTTAGIPKGSFYHYFRSKEVFGEAMLQRYFDRYDAAMESLLTQPQGDKRHHLLHYFAQSIANYCGSECHNACLAVKLSAEVSDLSEPMRHALDIGTARVIGRLQDAIEAGIEEGSLRITLSPAATAETLYALWLGASLRAKVKRSVTPLTCALESIELILQPT

SEQ ID NO: 156490 - DNA, 603 bp, Yersinia intermedia ATCC 29909
  CDS (1)..(603): transl_table=11
atgaacaaaatacagcacgcgcacatagacactcgtgaacatctgttagcaaccggtgagaaccttagcctgcgtcttggctttaatggtatgggtctcagcctgttactgaccacggcgggcatacctaaaggttcgttttatcactatttccgttcgaaggaagtttttggtgaggcgatgctacagcgttactttgatagttacgacgctgaaatggaaagcctgctaacccattcgcaaggtgatatgcgccatcatctgctgcactattttgctcaagctattgctaactattgtggcagtgaatgccacaatgcttgtctggcggttaaactctcagcagaggtaagtgacttatccgaacccatgcgacatgcgttggatattggcacagcccgtgtgattggtcgtttgcaagatgccattgaagccggtattgccgaaggctcactgcgcattacgctctcaccggcggcaacggctgaaacactgtatgccttgtggctcggtgcttcactgcgggcgaaggtgaaacgatcggttgctccgctgacctgtgcgctagaaagtatcgaactgattctacaaccagcccaataa

SEQ ID NO: 156491 - protein, 200 aa, Yersinia intermedia ATCC 29909
MNKIQHAHIDTREHLLATGENLSLRLGFNGMGLSLLLTTAGIPKGSFYHYFRSKEVFGEAMLQRYFDSYDAEMESLLTHSQGDMRHHLLHYFAQAIANYCGSECHNACLAVKLSAEVSDLSEPMRHALDIGTARVIGRLQDAIEAGIAEGSLRITLSPAATAETLYALWLGASLRAKVKRSVAPLTCALESIELILQPAQ

SEQ ID NO: 156492 - DNA, 591 bp, Vibrio sp. MED222
  CDS (1)..(591): transl_table=11
atgaacgataaaacgaacgacacacgcctgcatgttttagatgttggctaccaattaatagtgaacaacggctttaacggcgttggcttatcgcaattgcttaaagaagcggatgttccaaaaggatcgttttaccactactttaaatctaaagagcaatttggcgaggctctgatccagcactattttgagacctacatcagcagagttgaaactattttggttcatggtgaaggcaaccattaccagagaattatcagttatttcactcgatggtcacagattgaaaacggtacttgtaacgctcataaatgcttagtcgttaagctcagcgccgaagtttctgatctttctgatcctatgcgccaagcgctattgaaaggtgctgagaaagtgacgcataccatcgagcagtgcattgtcggtggtattgatgatggctcgataaaggttgaagagagccaagaaaccgctcaaaatctatattctatgtggttaggcgcaagcttattaagcaaactaagccagagttcacgtagcttagaatcagctttaaacctaacccaacagattttaaaaggtaaaaactaa

SEQ ID NO: 156493 - protein, 196 aa, Vibrio sp. MED222
MNDKTNDTRLHVLDVGYQLIVNNGFNGVGLSQLLKEADVPKGSFYHYFKSKEQFGEALIQHYFETYISRVETILVHGEGNHYQRIISYFTRWSQIENGTCNAHKCLVVKLSAEVSDLSDPMRQALLKGAEKVTHTIEQCIVGGIDDGSIKVEESQETAQNLYSMWLGASLLSKLSQSSRSLESALNLTQQILKGKN

SEQ ID NO: 156494 - DNA, 588 bp, Photobacterium sp. SKA34
  CDS (1)..(588): transl_table=11
atgaacgaaaaaacaattgatacacggcagcacattcttaatgttggttaccagctagttgtcacaaaaggatttacgagtgttggtttatcgcaattattaagtgcggcagaagtacctaaaggctctttctatcattatttcaaatctaaagagcaatttggtgaagcattgatccactcttattttcatcattatttacaacgtgtcgcccatgtattaaaaagcgagcaaggcacaggctttgaacaactcaatgagtatttcaagctatggatcaaagttgaaaatggcatctgtaatgctaataaatgtttggtggtaaaactcagtgcagaagtatccgatctctccgagcctatgcgagaagcattaaagcaaggagcagatagtgttgtcgctttaatcgctaatacaatagaaagaggaataaaagatggctcaatcgctaactgcgacagccatgtaaccgcccaaactctatataatttatggcttggagcaagtttactcaacaaactgagtcacgatttatcaggactacagcaagcattaacaacaacacaaacactactgctcccaaaataa

SEQ ID NO: 156495 - protein, 195 aa, Photobacterium sp. SKA34
MNEKTIDTRQHILNVGYQLVVTKGFTSVGLSQLLSAAEVPKGSFYHYFKSKEQFGEALIHSYFHHYLQRVAHVLKSEQGTGFEQLNEYFKLWIKVENGICNANKCLVVKLSAEVSDLSEPMREALKQGADSVVALIANTIERGIKDGSIANCDSHVTAQTLYNLWLGASLLNKLSHDLSGLQQALTTTQTLLLPK

SEQ ID NO: 156496 - DNA, 597 bp, Psychromonas sp. CNPT3
  CDS (1)..(597): transl_table=11
atgaaaatagaaagcaatacaacacgacaacatattttagactgtggttatcaattgatagcaaggcagggtttttctaatgtaggtctcgcgcaaatactcaagcacgcagaagtacccaaaggatctttttatcattactttaaatcgaaagaactttttggcgaagcccttattcaggattattttgcacaatacgacattgaactaacggccttttttgatacgcctaatggcagcgcctttgataaacttattgcttattggcaacgctggattgatgctcaaaatacacaaggggtagtacatacctgtcttgtcgttaaattaagcgctgaagtatctgatctttccgagtccatgcgcatcgccttattggcaggtgcaaaaaagatcattgcaagtttaagtttatgcattgaagcgggcataaaagataaatccattgcggtaaaagaagcaagtcaatgtgcagagctactctataacctatggataggcgcaagtttactgtgcaaactcagtaaagacagccatggtttagaacaaacaatgcgcttcactaaagatattttaaataataaagcacatttttaa

SEQ ID NO: 156497 - protein, 198 aa, Psychromonas sp. CNPT3
MKIESNTTRQHILDCGYQLIARQGFSNVGLAQILKHAEVPKGSFYHYFKSKELFGEALIQDYFAQYDIELTAFFDTPNGSAFDKLIAYWQRWIDAQNTQGVVHTCLVVKLSAEVSDLSESMRIALLAGAKKIIASLSLCIEAGIKDKSIAVKEASQCAELLYNLWIGASLLCKLSKDSHGLEQTMRFTKDILNNKAHF

SEQ ID NO: 156498 - DNA, 594 bp, Vibrionales bacterium SWAT-3
  CDS (1)..(594): transl_table=11
atgaacgagaaaacgaatgacacacgcctgcatattttgaatgttggctatcaattaatagtgaacaacggcttcaatggcgttggcttatcacaattgcttaaagaagcggaagtaccgaaaggatcgttttaccactactttaaatcgaaagagcaatttggtgaggcgttaattcagcactattttgaaaactacatcactaagattgaatccattttagtgcacggtgaaggcaaccattatcaacgaattctgggttacttttcactatgggcgaaaactgaagatggcacctgtaacgcacacaagtgtttagtggttaagctcagcgctgaagtttctgacctttctgatcctatgcgccaggctctgctaaaaggtgctgagaaagtcacgataaccattcaacaatgtattgttggcggtattgaagatggctctatctcggtagaaaacagtcaagaagcagcccagaacctatactcaatgtggctaggcgctagtttattaagcaagttaagccaaagttcacatagcttagaatcggcattacgccttaccgaacaaattttaaaaggtgagagccattaa

SEQ ID NO: 156499 - protein, 197 aa, Vibrionales bacterium SWAT-3
MNEKTNDTRLHILNVGYQLIVNNGFNGVGLSQLLKEAEVPKGSFYHYFKSKEQFGEALIQHYFENYITKIESILVHGEGNHYQRILGYFSLWAKTEDGTCNAHKCLVVKLSAEVSDLSDPMRQALLKGAEKVTITIQQCIVGGIEDGSISVENSQEAAQNLYSMWLGASLLSKLSQSSHSLESALRLTEQILKGESH

SEQ ID NO: 156500 - DNA, 588 bp, Vibrio harveyi HY01
  CDS (1)..(588): transl_table=11
atgaacgcaaaaacgaacgatacacgccaacacattctcgatgtcggctaccaattggtagtgaccaaaggttttacgagcgttggactctcagaactgttaaaggcagcggatgtgccgaaaggctctttctaccattactttaagtcgaaagagcaatttggtgaggcattgattgaagattacttctctcgctaccttaagatgatcacagcccactttactgaaagtgaaggctctggttgcgaccgccttttgagctatttcgaacgctggatggcgattgaaaatggccaatgtaacgccaacaaatgcttggtcgtgaagttgagtgctgaagtctctgatctttcagaagcaatgcgcgtaaaactggcttcgggtgccactcaagtggtgaaaaccatcgaagattgtgtccaagcgggcattgaagacggctctatccaagttgagtcagcagagcagactgcccacttgatttaccatcaatggattggtgcaagcttactcaacaaactgtatcaggatcgttccggtttaatgcgtagctttgagagcactcaaagtatgctaaaaggcaaataa

SEQ ID NO: 156501 - protein, 195 aa, Vibrio harveyi HY01
MNAKTNDTRQHILDVGYQLVVTKGFTSVGLSELLKAADVPKGSFYHYFKSKEQFGEALIEDYFSRYLKMITAHFTESEGSGCDRLLSYFERWMAIENGQCNANKCLVVKLSAEVSDLSEAMRVKLASGATQVVKTIEDCVQAGIEDGSIQVESAEQTAHLIYHQWIGASLLNKLYQDRSGLMRSFESTQSMLKGK

SEQ ID NO: 156502 - DNA, 600 bp, Vibrio parahaemolyticus AQ3810
  CDS (1)..(600): transl_table=11
atgaacgcaaaaacaaatgacacacgccaacacattctcgacgtcgggtacgaattgattgttacccgagggtttacgagtgttggactttcagagctactaaaaacggccgaagtgccaaaaggctcgttttatcattacttcaaatctaaagaacagtttggtgaggcaatgattcaagattacttcaacaagtattttgaacaactgactgcccgcttcactaataccgagctcaatggctaccaacgcttaatgagctactttgaagaaatggtaaaagtagaagatgatgtctgtaatgcaaacaaatgcttgttagtgaagctaagcgccgaagtgtcagatttatcggagcctatgcgtatcgcactgcgtcgaggcgctgataagaccattcaagctatggctgagtgtattgatgtcggtattcaagatggctctatcccaaacggtgatagcgcattgttggccagacagatttattatctttggaatggcgcaagcttactgaacaaactgtatcaagatcaggaagcgctcacgcaaagcctgacctatactcaacatctactgcaaaacacgcgtacttgcccataa

SEQ ID NO: 156503 - protein, 199 aa, Vibrio parahaemolyticus AQ3810
MNAKTNDTRQHILDVGYELIVTRGFTSVGLSELLKTAEVPKGSFYHYFKSKEQFGEAMIQDYFNKYFEQLTARFTNTELNGYQRLMSYFEEMVKVEDDVCNANKCLLVKLSAEVSDLSEPMRIALRRGADKTIQAMAECIDVGIQDGSIPNGDSALLARQIYYLWNGASLLNKLYQDQEALTQSLTYTQHLLQNTRTCP

SEQ ID NO: 156504 - DNA, 588 bp, Phaeobacter gallaeciensis 2.10
  CDS (1)..(588): transl_table=11
atgagtgacacccggctgcatattctggatactggacgcaccctgacagcgcagcgtggctatacctccgtcggtctgacggagctgttggcgacggcacaggtgcccaaggggtctttctaccactatttctcctccaaagaggactatggctgcgccctgctgcgccattacgtggagcagtatcggattgagctggcgccaacgctgaacaacccgtcgctgacagggcgtgatcaggtgctgtcctatgtcaccgcctggcaagaccggcagagctcagacatggccggtcaaaaatgcctcatcgtcaaactggccgctgaaatcgcggatctttccccggcgatgcgtggcatcctgcaacaggccgtcgaaggcattactgcccggctcgccgactgcctgcgtaaaggtcagcaggacggctctctcagcccggacgtcgaccccgtccagactgcaacatccctctatcagatctggcttggggccagcctgatggcccatctgtcgcaggacagcaccccgtttgacaccgccatggtccagacccggaccatgcttccctcgccccggcaaacctag

SEQ ID NO: 156505 - protein, 195 aa, Phaeobacter gallaeciensis 2.10
MSDTRLHILDTGRTLTAQRGYTSVGLTELLATAQVPKGSFYHYFSSKEDYGCALLRHYVEQYRIELAPTLNNPSLTGRDQVLSYVTAWQDRQSSDMAGQKCLIVKLAAEIADLSPAMRGILQQAVEGITARLADCLRKGQQDGSLSPDVDPVQTATSLYQIWLGASLMAHLSQDSTPFDTAMVQTRTMLPSPRQT

SEQ ID NO: 156506 - DNA, 600 bp, Salmonella enterica subsp. enterica serovar Saintpaul str. SARA29
  CDS (1)..(600): transl_table=11
atgaataagcaaaccgaacatgatacccgcgaacatctgctggccaccggcgagcagctttgtatgcaacggggttttaccggcatggggcttagcgaattgctcaaaaccgcccaggtgcctaaagggtcgttttatcactactttcgctcgaaagaagccttcggcgtcgccatgcttgagcgacattacgcctgctatcatcagcgtcttatggcgcacttcacctccggtcccggtaatcatcgcgatcgtcttctcgcctggtatcaggaaacgttaaagcagttttgccagcaaggcgccattagcggttgcctgacggtgaaactgtcagcggaggtctgcgatctgtcggaggatatgcgctctacgatggataaaggggcgcaggagatcatggcactgcttgcacgcgcgctggaagagggccgtaatagccactgtttacatttcaccggccagccgttgccacaagcgcaggtactttatgctctgtggctgggcgccaatttgcaggccaaaatatcccgtagcgccgcgccgctggaaaatgcgttggcgcatgttaagaccatcattgcaacgcctgagcaataa

SEQ ID NO: 156507 - protein, 199 aa, Salmonella enterica subsp. enterica serovar Saintpaul str. SARA29
MNKQTEHDTREHLLATGEQLCMQRGFTGMGLSELLKTAQVPKGSFYHYFRSKEAFGVAMLERHYACYHQRLMAHFTSGPGNHRDRLLAWYQETLKQFCQQGAISGCLTVKLSAEVCDLSEDMRSTMDKGAQEIMALLARALEEGRNSHCLHFTGQPLPQAQVLYALWLGANLQAKISRSAAPLENALAHVKTIIATPEQ

SEQ ID NO: 156508 - DNA, 936 bp, Burkholderia thailandensis TXDOH; identical to SEQ ID NO: 156474
  CDS (331)..(936): transl_table=11

SEQ ID NO: 156509 - protein, 201 aa, Burkholderia thailandensis TXDOH
MNAATTTADVRQHILDTAKPIMLCKGFTGVGLNEILAAAGVPKGSFYHYFGSKEAFGESILESYFDDYLAHLDELLVRGPGTAIDRLMRYWTQWQQMQMGDDPEGKCLVVKLGAEVCDLSEAMRAALERGTSQIVARLAACIAAAFDDGSLKAELDPQQTAEMLYELWIGATLIEKIRRNGEPLAVAMASTRRALGLPGAR

SEQ ID NO: 156510 - DNA, 621 bp, Burkholderia ubonensis Bu
  CDS (1)..(621): transl_table=11
atgaatgcatcttcaggcgcggaagtccgccagcacatcctgaacatcgcgaagccgatcatgctccacaaggggttttcggcggtcggtctgaacgagattctcgccgcggcgggcatcccgaagggctcgttctatcattatttcggctcgaaagaggcgttcggggaagcgctgctcgaagcgtacttcgacggctatctcgatcatctcgacaatctgctggtgcggcagccgggcacgggcgccgcgcgcctgatgacctactggaacaactggctgcgcacgcagtgcaacgacgatccggaaggcaagtgcctcgcggtgaagctcggcgccgaggtggcggatctgtccgaagcgatgcgttcggtcctgcggcgcggcaccgggcagatcatcgagcggctcgcggccggcatcgaaacggggctcgccgacggttcgctgcatgggatcgacgatccgtctcacaccgccgcgacgctgtatgagctgtggctcggcgcgacgctgctggagaagatccaccgcaaccgcaagccgctcgaaaccgcgatggccgcgacgctgcggatgctgaacctgccgcagtcggccggcaacggagcgtggcagtaa

SEQ ID NO: 156511 - protein, 206 aa, Burkholderia ubonensis Bu
MNASSGAEVRQHILNIAKPIMLHKGFSAVGLNEILAAAGIPKGSFYHYFGSKEAFGEALLEAYFDGYLDHLDNLLVRQPGTGAARLMTYWNNWLRTQCNDDPEGKCLAVKLGAEVADLSEAMRSVLRRGTGQIIERLAAGIETGLADGSLHGIDDPSHTAATLYELWLGATLLEKIHRNRKPLETAMAATLRMLNLPQSAGNGAWQ

SEQ ID NO: 156512 - DNA, 600 bp, Salmonella enterica
  subsp. enterica serovar 4,[5],12:i:- str. CVM23701
  CDS (1)..(600): transl_table=11
atgaataagcaaaccgaacacgatacccgcgaacatctgctggccaccggcgagcagctttgtatgcaacggggttttaccggcatggggcttagcgagttgctcaaaaccgcccaagtgcctaaagggtcgttttatcactactttcgctcgaaagaagccttcggcgtcgccatgcttgagcgacattacgcctgctatcatcagcgtcttacggcgcacttcacctgcggtcccggtaatcatcgcgatcgtcttctcgcctggtatcaggaaacgttaaagcagttttgccagcaaggcgccatcagcggttgcctgacggtgaaactgtcagcggaagtctgcgatctgtcggaggatatgcgctctacgatggataaaggggcgcaggagatcatggcactgcttgcacgcgcgctggaagatggccgtaatagccactgtttacatttcaccggccagccgttgccacaggcgcaggtactttatgccctgtggctgggcgccaatttgcaggccaaaatatcccgtagcgccgcgccgctggaaaatgcgttggcgcatgttaagaccatcattgcaacgcctgagcagtaa

SEQ ID NO: 156513 - protein, 199 aa, Salmonella enterica
  subsp. enterica serovar 4,[5],12:i:- str. CVM23701
MNKQTEHDTREHLLATGEQLCMQRGFTGMGLSELLKTAQVPKGSFYHYFRSKEAFGVAMLERHYACYHQRLTAHFTCGPGNHRDRLLAWYQETLKQFCQQGAISGCLTVKLSAEVCDLSEDMRSTMDKGAQEIMALLARALEDGRNSHCLHFTGQPLPQAQVLYALWLGANLQAKISRSAAPLENALAHVKTIIATPEQ

SEQ ID NO: 156514 - DNA, 600 bp, Salmonella enterica subsp. enterica serovar Kentucky str. CDC 191
  CDS (1)..(600): transl_table=11
atgaataagcaaaccgaacaccatacccgcgaacatctgctggccaccggcgagcagctttgtatgcaacggggttttaccggcatggggcttagcgagttgctcaaaaccgcccaggtgcctaaagggtcgttttatcactactttcgctcgaaagaagccttcggcgtcgccatgcttgagcgacattacgcctgctatcatcagcgtcttacggcgcacttcacctccggtcccggtaatcatcgcgatcgtcttctcgcctggtatcaggaaacgttaaagcagttttgccagcaaggcgccattagcggttgcctgacggtgaaactgtcagcggaagtctgcgatctgtcggaggatatgcgctctacgatggataaaggggcgcaggagatcatggcactgcttgcacgcgcgctggaagatggccgtaatagccactgtttacatttcaccggccagccgttgccacaggcgcaggtactttatgccctgtggctgggcgccaatttgcaggccaaaatatcccgtagcgccgcgccgctggaaaatgcgttggcgcatgttaagaccatcattgcaacgcctgagcagtaa

SEQ ID NO: 156515 - protein, 199 aa, Salmonella enterica subsp. enterica serovar Kentucky str. CDC 191
MNKQTEHHTREHLLATGEQLCMQRGFTGMGLSELLKTAQVPKGSFYHYFRSKEAFGVAMLERHYACYHQRLTAHFTSGPGNHRDRLLAWYQETLKQFCQQGAISGCLTVKLSAEVCDLSEDMRSTMDKGAQEIMALLARALEDGRNSHCLHFTGQPLPQAQVLYALWLGANLQAKISRSAAPLENALAHVKTIIATPEQ

SEQ ID NO: 156516 - DNA, 600 bp, Salmonella enterica
  subsp. enterica serovar Schwarzengrund str. SL480
  CDS (1)..(600): transl_table=11
atgaataagcaaaccgaacacgatacccgcgaacatctgctggccaccggcgagcagctttgtatgcaacggggttttaccggcatggggcttagcgagttgctcaaaaccgcccaggtgcctaaagggtcgttttatcactactttcgctcgaaagaagccttcggcgtcgccatgcttgaacgacattacgcctgctatcatcagcgtcttacggcgcacttcacctccggtcccggtaatcatcgcgatcgtcttctcgcctggtatcaggaaacgttaaagcagttttgccagcaaggcaccatcagcggttgcctgacggtgaaactgtcagcggaagtctgcgatctgtcggaggatatgcgctctacgatggataaaggggcgcaggagatcatggcactgcttgcacgcgcgctggaagatggccgtaatagccactgtttacatttcaccggccagccgttgccgcaggcgcaggtactttatgccctgtggctgggcgccaatttgcaggccaaaatatcccgtagcgccgcgccactggaaaatgcgttggcgcatgttaagaccatcattgcaacgcgtgagctgtaa

SEQ ID NO: 156517 - protein, 199 aa, Salmonella enterica
  subsp. enterica serovar Schwarzengrund str. SL480
MNKQTEHDTREHLLATGEQLCMQRGFTGMGLSELLKTAQVPKGSFYHYFRSKEAFGVAMLERHYACYHQRLTAHFTSGPGNHRDRLLAWYQETLKQFCQQGTISGCLTVKLSAEVCDLSEDMRSTMDKGAQEIMALLARALEDGRNSHCLHFTGQPLPQAQVLYALWLGANLQAKISRSAAPLENALAHVKTIIATREL

SEQ ID NO: 156518 - DNA, 600 bp, Escherichia coli O157:H7 str. EC4113
  CDS (1)..(600): transl_table=11
atgaacaaacacaccgaacatgatactcgcgaacatctcctggcgacgggcgagcaactttgcctgcaacgtggattcaccgggatggggctaagcgaattactaaaaaccgctgaagtgccgaaagggtccttctatcactactttcgctctaaagaagcgtttggcgttgccatgcttgagcgccattacgccacatatcaccaacgactgactgagttgctgcaatccggcgaaggtaactaccgcgaccgcatactggcttattaccagcaaacactgaaccagttttgccaacatggaaccatcagtggttgcctgacagtaaaactctctgccgaagtgtgcgatctgtcagaagatatgcgtagcgcgatggataaaggcgctcgcggcgtgatcgccctgctctcgcaggctctggaaaatggccgtgatagccattgtttaaccttttgtggcgaaccgctgcaacaggcacaagtgctttacgcactatggctgggtgcgaatctgcaggccaaaatttcgcgcaattacgagccactggaaaacgcgctggcacatgtaaaaaccattattgcgacgcctgccgtttag

SEQ ID NO: 156519 - protein, 199 aa, Escherichia coli O157:H7 str. EC4113
MNKHTEHDTREHLLATGEQLCLQRGFTGMGLSELLKTAEVPKGSFYHYFRSKEAFGVAMLERHYATYHQRLTELLQSGEGNYRDRILAYYQQTLNQFCQHGTISGCLTVKLSAEVCDLSEDMRSAMDKGARGVIALLSQALENGRDSHCLTFCGEPLQQAQVLYALWLGANLQAKISRNYEPLENALAHVKTIIATPAV

SEQ ID NO: 156520 - DNA, 600 bp, Salmonella enterica
  subsp. enterica serovar Weltevreden str. HI_N05-537
  CDS (1)..(600): transl_table=11
atgaataagcaaaccgaacaccatacccgcgaacatctgctggccaccggcgagcagctttgtatgcaacggggttttaccggcatggggcttagcgagttgctcaaaaccgcccaggtgcctaaagggtcgttttatcactactttcgctcgaaagaagccttcggcgtcgccatgcttgagcgacattactcctgctatcatcagcgtcttacggcgcacttcacctccggtcccggtaatcatcgcgatcgtcttctcgcctggtatcaggaaacgttaaagcagttttgccagcaaggcgccatcagcggttgcctgacggtgaaactgtcagcggaagtctgcgatctgtcagaggatatgcgctctacgatggataaaggggcgcaggagatcatggcactgcttgcacgcgcgctggaagatggccgtaatagccactgtttacatttcaccggccagccgttgccacaggcgcaggtactttatgccctgtggctgggcgccaatttgcaggccaaaatatcccgtagcgccgcgccgctggaaaatgcgttggcgcatgttaagaccatcattgcaacgcctgagcagtaa

SEQ ID NO: 156521 - protein, 199 aa, Salmonella enterica
  subsp. enterica serovar Weltevreden str. HI_N05-537
MNKQTEHHTREHLLATGEQLCMQRGFTGMGLSELLKTAQVPKGSFYHYFRSKEAFGVAMLERHYSCYHQRLTAHFTSGPGNHRDRLLAWYQETLKQFCQQGAISGCLTVKLSAEVCDLSEDMRSTMDKGAQEIMALLARALEDGRNSHCLHFTGQPLPQAQVLYALWLGANLQAKISRSAAPLENALAHVKTIIATPEQ

SEQ ID NO: 156522 - DNA, 621 bp, Burkholderia ambifaria IOP40-10
  CDS (1)..(621): transl_table=11
atgaatgcatcttcaggcgcggaagtccgccagcacatcctgaacaccgcgaagccgatcatgctccagaaggggttctcggcggtcggtctgaacgagattctcgccgcggcgggcatcccgaagggctcgttctaccattacttcggctcgaaggaagcattcggcgaggcgctgctcgagtcgtatttcgaaggctatctcgcgtatctcgacaacctgttcaagcatcaggccggcacgggcgcgcagcgcctgatgacgtactggaacaactggctgcacatgcagtgcgcggacgatccggaaggcaagtgcctcgcggtcaagctcggcgcggaggtgtccgacttgtcggaggcgatgcgcgcggtgctgcggcgcggcaccagtcagatcatcgagcggctcgcgggcggcatcgaggccgggctggccgacggttcgctgagcggcgtcgacgatcccgcacatgcggccgcgattctgtacgagctgtggcttggcgcaacgctgctggagaagatccaccgcaaccgccagccgctcgagcgcgcgatgctcgaaacccggcggatgctgaacctgccgcccgtcgagccggacggagcgcagtcataa

SEQ ID NO: 156523 - protein, 206 aa, Burkholderia ambifaria IOP40-10
MNASSGAEVRQHILNTAKPIMLQKGFSAVGLNEILAAAGIPKGSFYHYFGSKEAFGEALLESYFEGYLAYLDNLFKHQAGTGAQRLMTYWNNWLHMQCADDPEGKCLAVKLGAEVSDLSEAMRAVLRRGTSQIIERLAGGIEAGLADGSLSGVDDPAHAAAILYELWLGATLLEKIHRNRQPLERAMLETRRMLNLPPVEPDGAQS

SEQ ID NO: 156524 - DNA, 600 bp, Enterobacter cancerogenus ATCC 35316
  CDS (1)..(600): transl_table=11
atgagcagacacactgaacacgatacgcgcgaacatctactggctaccggcgagcgtctttgcatgcatcgcgggtttaccggaatggggctgagcgaactgttaaaaaccgccgaagtgccgaagggatcgttttatcactattttcgatccaaagaagccttcggcgtggcgatgcttgagcggcactatgccagctatcatcaacgcctcgccacccattttgcccagggtgaaggcaactatcgggatcgtgtgctgaactactatcaggaaacgctgactcagttctgtcagcagggcattattagcggctgcctgacggtaaaactttctgccgaggtgtgcgatctttccgaagatatgcgcgcagccatggataaaggcgccacgggtgttatcgccctgcttgcacaggcgctggagaaaggtcgcgacgaaaaaacgctggccttctccggggagccgttaacccaggcgcaggttctttatgccctgtggttaggcgccaatctgcaggccaaaatttctcgcagtgccgcaccgcttgaaagcgccctggcacatgtgaaatgcacgattacagcgcctggcgtttag

SEQ ID NO: 156525 - protein, 199 aa, Enterobacter cancerogenus ATCC 35316
MSRHTEHDTREHLLATGERLCMHRGFTGMGLSELLKTAEVPKGSFYHYFRSKEAFGVAMLERHYASYHQRLATHFAQGEGNYRDRVLNYYQETLTQFCQQGIISGCLTVKLSAEVCDLSEDMRAAMDKGATGVIALLAQALEKGRDEKTLAFSGEPLTQAQVLYALWLGANLQAKISRSAAPLESALAHVKCTITAPGV

SEQ ID NO: 156526 - DNA, 603 bp, Acinetobacter baumannii (strain ATCC 17978 / NCDC KC 755)
  CDS (1)..(603): transl_table=11
atgaaacgattaaataaaagcgaaaccacacgacaacacattttagatactagttttgaattggtattacataaaggttttgtcggtgttggtttacaagaaattttaaaggcttgtgacgtacctaaaggttcgttctatcactactttgcttcaaaagaggcgtttggctgtgcgttgctcgagcaatacatggccaattataaagtccgtatggaacagctttggcaacacagtgagcaaagtgcccatgcccttttaatggctttatggcaggcgtggattgatgatccggtccatggtagctgggctgaaaactgcttgattgtgaaattggcagctgaagtttcggacttatcagaagatatgcgtcaaattctcaatgacggtgtgcacaaattaacgcagcgtctagctttgctactcaaagaagggcaacaagaaggatcaattccaaaacatattgaacctttgaaaactgcgcaagtcatgtatcagttatggttaggtgctgctttactcacaaaattgtcgcaagacaaagcacatctacatctagccttagaaaccacccaacaactcttaaaaccgatagaggaataa

SEQ ID NO: 156527 - protein, 200 aa, Acinetobacter baumannii (strain ATCC 17978 / NCDC KC 755)
MKRLNKSETTRQHILDTSFELVLHKGFVGVGLQEILKACDVPKGSFYHYFASKEAFGCALLEQYMANYKVRMEQLWQHSEQSAHALLMALWQAWIDDPVHGSWAENCLIVKLAAEVSDLSEDMRQILNDGVHKLTQRLALLLKEGQQEGSIPKHIEPLKTAQVMYQLWLGAALLTKLSQDKAHLHLALETTQQLLKPIEE

SEQ ID NO: 156528 - DNA, 591 bp, Octadecabacter antarcticus 307
  CDS (1)..(591): transl_table=11
atgagtaatcgagagacagatacacgtgaacacattttagctactggtcgccgccttaccgcgcagcagggctattccggtgttggtctcaatgagctgctgaaaaaggccggcgtgcccaagggatcattctatcactacttccgttccaaggaagcgtacgggtgcgctgtgctcaaagacttcgtgcatgattactcggaccgcctcgcctcgtctctcgatcacccaacacttaatgcgcgtgctcgattgcttgcctacttcgaaggctggcatcaaaatcaggtcagccccaacctcgaagatcgttgtcttgtcgttaaattgtctgctgaagtcgctgacttgtccaaggatatgagcgagattctgcggcaaggtgtaatcgaaatcattgcacgtctggcggttacgttggacgacggcatcgcagaaggctcgattgcccagattgacgacaccaatggtatggcggaggcgatttatcatcagtggttaggcgcaagtctggttgcgagcttgtcccatgatgactccccacttaaatccgcgatgcacacgacgcagcaacttatcccctctgcttga

SEQ ID NO: 156529 - protein, 196 aa, Octadecabacter antarcticus 307
MSNRETDTREHILATGRRLTAQQGYSGVGLNELLKKAGVPKGSFYHYFRSKEAYGCAVLKDFVHDYSDRLASSLDHPTLNARARLLAYFEGWHQNQVSPNLEDRCLVVKLSAEVADLSKDMSEILRQGVIEIIARLAVTLDDGIAEGSIAQIDDTNGMAEAIYHQWLGASLVASLSHDDSPLKSAMHTTQQLIPSA

SEQ ID NO: 156530 - DNA, 600 bp, Rhodobacterales bacterium HTCC2083
  CDS (1)..(600): transl_table=11
atgaagcggatcatggaacagcaaaacgacacccgctcacagatattaaccacaggacgccgcctgactgcccagcagggctacacaggtgtcggtctgagctctctattgaaagaagccggggttccaaaggggtcgttctatcactacttcgcttccaaggaggcttatggctgcgcgctgttggaagagtttatgacagagtatggcactcgcctgaatgcgtcactcgcgcatcccgatatggatgcgcggtctcgggtttttacctatttcgaaaggtggcgcacgaaacagcttagcccggaccctgtgaaccggtgtctggtcgtcaaactatcggcagaggttgctgatctatctgcagacatgagtattctcctgcaaaaacttgtatctgatattttgacgcatctggcgcgcacccttgaacagggggcggatgatggcacaatcgttccgctagaagatcctgcagcctcggcggaaatgctctatcatatgtggctgggcgccagcttggttgcgagcatctcacacagtgatgcccccctcaattctgcaatggatgccacaagggcgcttcttccagccccctga

SEQ ID NO: 156531 - protein, 199 aa, Rhodobacterales bacterium HTCC2083
MKRIMEQQNDTRSQILTTGRRLTAQQGYTGVGLSSLLKEAGVPKGSFYHYFASKEAYGCALLEEFMTEYGTRLNASLAHPDMDARSRVFTYFERWRTKQLSPDPVNRCLVVKLSAEVADLSADMSILLQKLVSDILTHLARTLEQGADDGTIVPLEDPAASAEMLYHMWLGASLVASISHSDAPLNSAMDATRALLPAP

SEQ ID NO: 156532 - DNA, 603 bp, Providencia rustigianii DSM 4541
  CDS (1)..(603): transl_table=11
atgaaatcaaaagttaatgttcacgatgtacgtagtcatatcttggaaaccggccagtgtattatcagtggtaaagggtttagtgctgtcggattgagcgaaattctgaagaccgctggtgtgcctaaagggtccttttatcattattttggatccaaagaggcctttggtgaggaattactaaagagctatttttccgactatcaaacgtctctggagacattgctttcgcgatcaaatttgtctggagcagaacgattgatgagttactgggaagtctggctggaaactcagtcggcctgcgacccgaaaggcaagtgtctggcagtcaaacttgcagccgaagttagcgatttatccgaaaccatgcgtattgtgttgcagcaagggacggatcgagttatcgcaagacttgctcgagcggttgaagacggcattgctgatggctcgttatctgctcatctggatgcgaaaacgacagcgtctactctctatcaattatggttgggtgcgagcttgcttgcgaaaatcacacgcagccgtgagcccttggaatcagcgtttgaggcaacaaaaagtttgctggggtttaaaaagaattaa

SEQ ID NO: 156533 - protein, 200 aa, Providencia rustigianii DSM 4541
MKSKVNVHDVRSHILETGQCIISGKGFSAVGLSEILKTAGVPKGSFYHYFGSKEAFGEELLKSYFSDYQTSLETLLSRSNLSGAERLMSYWEVWLETQSACDPKGKCLAVKLAAEVSDLSETMRIVLQQGTDRVIARLARAVEDGIADGSLSAHLDAKTTASTLYQLWLGASLLAKITRSREPLESAFEATKSLLGFKKN

SEQ ID NO: 156534 - DNA, 594 bp, Roseobacter sp. GAI101
  CDS (1)..(594): transl_table=11
atgacagagcaaaagaaatcagatcagacacgacagaaaatactgacggcgggccgtgcgcttatcagcaagcatggctttggcgctgtcgggctggcgcgaatcctcaaggaaagcggtgtgcccaaggggtcgttctattattacttcccctcaaaggaagcattcgggcacgccctgctgaccgactatgtgtccgactacctcgcccgaatcgacgcgctttgtgccggtccggggtctgcccgggacaagctgaccgcattctggaccgcctggttggcccaggcaggatcggaaggcattgccagccaatgccttgtcgtcaagctgggtgccgaagtggccgacctgtcagaagacatgcggtgcgtgctggacgatggcgtcgccaagctggtcgacaaaatcgccgccctgctggtgcagggggcgaaagacgggtcgctgataccggtcgatgatccgcaggcaacggcgcagatgctttatgcgaaatggctgggggccgcgattctctccaaactgtcgcgcgatgaaacgccgctgcggcgggctttgtccgaaacgaattcaaccctttcaacatcctga

SEQ ID NO: 156535 - protein, 197 aa, Roseobacter sp. GAI101
MTEQKKSDQTRQKILTAGRALISKHGFGAVGLARILKESGVPKGSFYYYFPSKEAFGHALLTDYVSDYLARIDALCAGPGSARDKLTAFWTAWLAQAGSEGIASQCLVVKLGAEVADLSEDMRCVLDDGVAKLVDKIAALLVQGAKDGSLIPVDDPQATAQMLYAKWLGAAILSKLSRDETPLRRALSETNSTLSTS

SEQ ID NO: 156536 - DNA, 23 bp, Artificial sequence
  primer
atgaacaaacacaccgaacatga

SEQ ID NO: 156537 - DNA, 24 bp, Artificial sequence
  primer
ttaaacggcaggcgtcgcaataat

SEQ ID NO: 156538 - protein, 181 aa, Artificial sequence
  consensus sequence
  Variant (2)..(2): Xaa in position 2 is any amino acid
  Variant (4)..(4): Xaa in position 4 is any amino acid
  Variant (6)..(8): Xaa in position 6 to 8 is any amino acid
  Variant (9)..(15): Xaa in position 9 to 15 is any or no amino acid
  Variant (18)..(18): Xaa in position 18 is any amino acid
  Variant (19)..(20): Xaa in position 19 to 20 is any or no amino acid
  Variant (23)..(25): Xaa in position 23 to 25 is any amino acid
  Variant (27)..(28): Xaa in position 27 to 28 is any amino acid
  Variant (30)..(30): Xaa in position 30 is any amino acid
  Variant (41)..(41): Xaa in position 41 is any amino acid
  Variant (45)..(45): Xaa in position 45 is any amino acid
  Variant (48)..(48): Xaa in position 48 is any amino acid
  Variant (50)..(50): Xaa in position 50 is any amino acid
  Variant (52)..(57): Xaa in position 52 to 57 is any amino acid
  Variant (59)..(78): Xaa in position 59 to 78 is any amino acid
  Variant (79)..(79): Xaa in position 79 is any or no amino acid
  Variant (81)..(95): Xaa in position 81 to 95 is any amino acid
  Variant (96)..(98): Xaa in position 96 to 98 is any or no amino acid
  Variant (101)..(101): Xaa in position 101 is any amino acid
  Variant (105)..(105): Xaa in position 105 is any amino acid
  Variant (109)..(109): Xaa in position 109 is any amino acid
  Variant (114)..(114): Xaa in position 114 is any amino acid
  Variant (117)..(121): Xaa in position 117 to 121 is any amino acid
  Variant (123)..(129): Xaa in position 123 to 129 is any amino acid
  Variant (131)..(136): Xaa in position 131 to 136 is any amino acid
  Variant (138)..(151): Xaa in position 138 to 151 is any amino acid
  Variant (152)..(154): Xaa in position 152 to 154 is any or no amino acid
  Variant (156)..(157): Xaa in position 156 to 157 is any amino acid
  Variant (160)..(161): Xaa in position 160 to 161 is any amino acid
  Variant (166)..(166): Xaa in position 166 is any amino acid
  Variant (168)..(169): Xaa in position 168 to 169 is any amino acid
  Variant (171)..(177): Xaa in position 171 to 177 is any amino acid
  Variant (179)..(180): Xaa in position 179 to 180 is any amino acid
RXHXLXXXXXXXXXXGFXXXGLXXXLXXAXVPKGSFYHYFXSKEXFGXAXLXXXXXXYXXXXXXXXXXXXXXXXXXXXXYXXXXXXXXXXXXXXXXXXCLXVKLXAEVXDLSEXMRXXXXXGXXXXXXXLXXXXXXGXXXXXXXXXXXXXXXXXAXXLYXXWLGAXLXXKXXXXXXXLXXA

SEQ ID NO: 156539 - protein, 34 aa, Artificial sequence
  protein pattern
  Variant (2)..(3): Xaa in position 2 to 3 is any amino acid
  Variant (4)..(4): Xaa in position 4 is any or no amino acid
  Variant (6)..(7): Xaa in position 6 to 7 is any amino acid
  Variant (8)..(8): Xaa in position 8 is any or no amino acid
  Variant (10)..(10): Xaa in position 10 is Asp, Glu, Gly or Gln
  Variant (21)..(21): Xaa in position 21 is any amino acid
  Variant (25)..(25): Xaa in position 25 is any amino acid
  Variant (26)..(26): Xaa in position 26 is Phe or Tyr
  Variant (28)..(28): Xaa in position 28 is any amino acid
  Variant (29)..(29): Xaa in position 29 is Ala, Glu or Ser
  Variant (30)..(30): Xaa in position 30 is Ile, Leu, Met or Val
  Variant (31)..(31): Xaa in position 31 is Ile or Leu
  Variant (32)..(33): Xaa in position 32 to 33 is any amino acid
  Variant (34)..(34): Xaa in position 34 is Phe, His or Tyr
LXXXLXXXAXVPKGSFYHYFXSKEXXGXXXXXXX

SEQ ID NO: 156540 - protein, 32 aa, Artificial sequence
  protein pattern
  Variant (3)..(3): Xaa in position 3 is Ala, Thr or Val
  Variant (7)..(7): Xaa in position 7 is Ala, Gly or Ser
  Variant (11)..(11): Xaa in position 11 is Ala, Cys or Ser
  Variant (16)..(16): Xaa in position 16 is Ala, Asp, Pro, Ser or Thr
  Variant (19)..(20): Xaa in position 19 to 20 is any amino acid
  Variant (21)..(21): Xaa in position 21 is Leu or Met
  Variant (22)..(23): Xaa in position 22 to 23 is any amino acid
  Variant (25)..(27): Xaa in position 25 to 27 is any amino acid
  Variant (28)..(31): Xaa in position 28 to 31 is any or no amino acid
CLXVKLXAEVXDLSEXMRXXXXXGXXXXXXXI

SEQ ID NO: 156541 - protein, 33 aa, Artificial sequence
  protein pattern
  Variant (2)..(2): Xaa in position 2 is any or no amino acid
  Variant (4)..(5): Xaa in position 4 to 5 is any amino acid
  Variant (7)..(7): Xaa in position 7 is Ile, Leu or Val
  Variant (10)..(10): Xaa in position 10 is Ala, Asn, Ser or Thr
  Variant (12)..(13): Xaa in position 12 to 13 is any amino acid
  Variant (15)..(15): Xaa in position 15 is Ile, Leu or Val
  Variant (16)..(21): Xaa in position 16 to 21 is any amino acid
  Variant (23)..(24): Xaa in position 23 to 24 is any amino acid
  Variant (25)..(25): Xaa in position 25 is Ala, Cys, Ser or Thr
  Variant (26)..(26): Xaa in position 26 is Phe, Leu or Met
  Variant (27)..(32): Xaa in position 27 to 32 is any amino acid
  Variant (33)..(33): Xaa in position 33 is Ile or Leu
LXYXXWXGAXLXXKXXXXXXXLXXXXXXXXXXX

SEQ ID NO: 156542 - DNA, 1047 bp, Escherichia coli
  CDS (1)..(1047): transl_table=11
atgaacagaactgacgaactccgtactgcgcgtattgagagcctggtaacgcccgccgaactcgcgctacggtatcccgtaacgcctggcgtcgccacccatgtcaccgactcccgccgcagaattgaaaaaatactgaatggtgaagataagcgactgttggtcattattggcccctgctcgatccacgatctcaccgctgcaatggagtacgccacccgtctgcagtcgctgcgcaaccagtaccagtcacggctggaaatcgtaatgcgcacctattttgaaaaaccacgaactgttgtcggctggaaaggactaatctccgatccagatttaaacggcagctatcgggtaaatcacggtctggagctggcgcgcaaattacttttacaggtaaatgagctgggcgtcccaaccgcgaccgagttcctcgatatggtgaccggtcagtttattgctgatttaatcagttggggcgcgattggcgcacgtactaccgaaagtcagatccaccgcgaaatggcttcggcactctcctgtccggtaggttttaaaaatggtaccgatggcaatacgcggattgctgtggatgctatccgcgcagcccgcgccagccatatgttcctctcgccagacaaaaatggtcagatgaccatctatcagaccagcggcaacccgtatggccacattattatgcgtggcggcaaaaaaccgaattatcatgccgatgatatcgccgcagcctgcgatacgctgcacgagtttgatttacctgaacatctggtggtggatttcagccacggtaactgccagaagcagcaccgtcgccagttagaagtttgtgaggatatttgtcagcaaatccgcaatggctctacggcgattgctggaattatggcggaaagtttcctgcgcgaaggaacgcaaaaaatcgtcggcagtcagccgctcacttacggtcaatccattaccgacccgtgtctgggctgggaggataccgaacgcctggtcgaaaaactcgcctctgcggtagatacccgcttctaa

SEQ ID NO: 156543 - protein, 348 aa, Escherichia coli; identical to SEQ ID NO: 75789

SEQ ID NO: 156544 - DNA, 1083 bp, Methylophilus methylotrophus; AS-1; identical to SEQ ID NO: 75288
  CDS (1)..(1083)

SEQ ID NO: 156545 - protein, 360 aa, Methylophilus methylotrophus; AS-1; identical to SEQ ID NO: 75289

SEQ ID NO: 156546 - DNA, 1080 bp, Dichelobacter nodosus VCS1703A; identical to SEQ ID NO: 75514
  CDS (1)..(1080): transl_table=11

SEQ ID NO: 156547 - protein, 359 aa, Dichelobacter nodosus VCS1703A; identical to SEQ ID NO: 75515

SEQ ID NO: 156548 - DNA, 1092 bp, Mesorhizobium loti MAFF303099; identical to SEQ ID NO: 75292
  CDS (1)..(1092): transl_table=11

SEQ ID NO: 156549 - protein, 363 aa, Mesorhizobium loti MAFF303099; identical to SEQ ID NO: 75293

SEQ ID NO: 156550 - DNA, 1074 bp, Vibrio cholerae O1 biovar eltor str. N16961; identical to SEQ ID NO: 75294
  CDS (1)..(1074): transl_table=11

SEQ ID NO: 156551 - protein, 357 aa, Vibrio cholerae O1 biovar eltor str. N16961; identical to SEQ ID NO: 75295

SEQ ID NO: 156552 - DNA, 1086 bp, Pasteurella multocida subsp. multocida str. Pm70; identical to SEQ ID NO: 75296
  CDS (1)..(1086): transl_table=11

SEQ ID NO: 156553 - protein, 361 aa, Pasteurella multocida subsp. multocida str. Pm70; identical to SEQ ID NO: 75297

SEQ ID NO: 156554 - DNA, 1038 bp, Lactococcus lactis subsp. lactis Il1403; identical to SEQ ID NO: 75304
  CDS (1)..(1038): transl_table=11

SEQ ID NO: 156555 - protein, 345 aa, Lactococcus lactis subsp. lactis Il1403; identical to SEQ ID NO: 75305

SEQ ID NO: 156556 - DNA, 1056 bp, Neisseria meningitidis MC58; identical to SEQ ID NO: 75308
  CDS (1)..(1056): transl_table=11

SEQ ID NO: 156557 - protein, 351 aa, Neisseria meningitidis MC58; identical to SEQ ID NO: 75309

SEQ ID NO: 156558 - DNA, 1071 bp, Escherichia coli O157:H7 EDL933; identical to SEQ ID NO: 88899
  CDS (1)..(1071): transl_table=11

SEQ ID NO: 156559 - protein, 356 aa, Escherichia coli O157:H7 EDL933; identical to SEQ ID NO: 88900

SEQ ID NO: 156560 - DNA, 1086 bp, Deinococcus radiodurans R1; identical to SEQ ID NO: 75312
  CDS (1)..(1086): transl_table=11

SEQ ID NO: 156561 - protein, 361 aa, Deinococcus radiodurans R1; identical to SEQ ID NO: 75313

SEQ ID NO: 156562 - DNA, 1032 bp, Streptococcus pneumoniae TIGR4; identical to SEQ ID NO: 75316
  CDS (1)..(1032): transl_table=11

SEQ ID NO: 156563 - protein, 343 aa, Streptococcus pneumoniae TIGR4; identical to SEQ ID NO: 75317

SEQ ID NO: 156564 - DNA, 1071 bp, Yersinia pestis CO92; identical to SEQ ID NO: 75322
  CDS (1)..(1071): transl_table=11

SEQ ID NO: 156565 - protein, 356 aa, Yersinia pestis CO92; identical to SEQ ID NO: 75323

SEQ ID NO: 156566 - DNA, 1110 bp, Caulobacter crescentus CB15; identical to SEQ ID NO: 75324
  CDS (1)..(1110): transl_table=11

SEQ ID NO: 156567 - protein, 369 aa, Caulobacter crescentus CB15; identical to SEQ ID NO: 75325

SEQ ID NO: 156568 - DNA, 1053 bp, Salmonella typhimurium LT2; identical to SEQ ID NO: 75326
  CDS (1)..(1053): transl_table=11

SEQ ID NO: 156569 - protein, 350 aa, Salmonella typhimurium LT2; identical to SEQ ID NO: 75327

SEQ ID NO: 156570 - DNA, 1131 bp, Nostoc sp. PCC 7120; identical to SEQ ID NO: 75328
  CDS (1)..(1131): transl_table=11

SEQ ID NO: 156571 - protein, 376 aa, Nostoc sp. PCC 7120; identical to SEQ ID NO: 75329

SEQ ID NO: 156572 - DNA, 1119 bp, Schizosaccharomyces pombe 972h-; identical to SEQ ID NO: 75334
  CDS (1)..(1119)

SEQ ID NO: 156573 - protein, 372 aa, Schizosaccharomyces pombe 972h-; identical to SEQ ID NO: 75335

SEQ ID NO: 156574 - DNA, 1074 bp, Xanthomonas campestris pv. campestris str. ATCC 33913; identical to SEQ ID NO: 75336
  CDS (1)..(1074): transl_table=11

SEQ ID NO: 156575 - protein, 357 aa, Xanthomonas campestris pv. campestris str. ATCC 33913; identical to SEQ ID NO: 75337

SEQ ID NO: 156576 - DNA, 1074 bp, Xanthomonas axonopodis pv. citri str. 306; identical to SEQ ID NO: 75338
  CDS (1)..(1074): transl_table=11

SEQ ID NO: 156577 - protein, 357 aa, Xanthomonas axonopodis pv. citri str. 306; identical to SEQ ID NO: 75339

SEQ ID NO: 156578 - DNA, 1062 bp, Chlorobium tepidum TLS; identical to SEQ ID NO: 75340
  CDS (1)..(1062): transl_table=11

SEQ ID NO: 156579 - protein, 353 aa, Chlorobium tepidum TLS; identical to SEQ ID NO: 75341

SEQ ID NO: 156580 - DNA, 1047 bp, Yersinia pestis KIM; identical to SEQ ID NO: 75344
  CDS (1)..(1047): transl_table=11

SEQ ID NO: 156581 - protein, 348 aa, Yersinia pestis KIM; identical to SEQ ID NO: 75345

SEQ ID NO: 156582 - DNA, 1053 bp, Yersinia pestis KIM; identical to SEQ ID NO: 75346
  CDS (1)..(1053): transl_table=11

SEQ ID NO: 156583 - protein, 350 aa, Yersinia pestis KIM; identical to SEQ ID NO: 75347

SEQ ID NO: 156584 - DNA, 1062 bp, Thermosynechococcus elongatus BP-1; identical to SEQ ID NO: 75348
  CDS (1)..(1062): transl_table=11

SEQ ID NO: 156585 - protein, 353 aa, Thermosynechococcus elongatus BP-1; identical to SEQ ID NO: 75349

SEQ ID NO: 156586 - DNA, 1233 bp, Bifidobacterium longum NCC2705; identical to SEQ ID NO: 75350
  CDS (1)..(1233): transl_table=11

SEQ ID NO: 156587 - protein, 410 aa, Bifidobacterium longum NCC2705; identical to SEQ ID NO: 75351

SEQ ID NO: 156588 - DNA, 1053 bp, Shigella flexneri 2a str. 301; identical to SEQ ID NO: 75354
  CDS (1)..(1053): transl_table=11

SEQ ID NO: 156589 - protein, 350 aa, Shigella flexneri 2a str. 301; identical to SEQ ID NO: 75355

SEQ ID NO: 156590 - DNA, 1065 bp, Shewanella oneidensis MR-1; identical to SEQ ID NO: 75362
  CDS (1)..(1065): transl_table=11

SEQ ID NO: 156591 - protein, 354 aa, Shewanella oneidensis MR-1; identical to SEQ ID NO: 75363

SEQ ID NO: 156592 - DNA, 1170 bp, Corynebacterium efficiens YS-314; identical to SEQ ID NO: 75370
  CDS (1)..(1170): transl_table=11

SEQ ID NO: 156593 - protein, 389 aa, Corynebacterium efficiens YS-314; identical to SEQ ID NO: 75371

SEQ ID NO: 156594 - DNA, 1113 bp, Pseudomonas putida KT2440; identical to SEQ ID NO: 75372
  CDS (1)..(1113): transl_table=11

SEQ ID NO: 156595 - protein, 370 aa, Pseudomonas putida KT2440; identical to SEQ ID NO: 75373

SEQ ID NO: 156596 - DNA, 1086 bp, Bradyrhizobium japonicum USDA 110; identical to SEQ ID NO: 75390
  CDS (1)..(1086): transl_table=11

SEQ ID NO: 156597 - protein, 361 aa, Bradyrhizobium japonicum USDA 110; identical to SEQ ID NO: 75391

SEQ ID NO: 156598 - DNA, 1053 bp, Vibrio parahaemolyticus RIMD 2210633; identical to SEQ ID NO: 75400
  CDS (1)..(1053): transl_table=11

SEQ ID NO: 156599 - protein, 350 aa, Vibrio parahaemolyticus RIMD 2210633; identical to SEQ ID NO: 75401

SEQ ID NO: 156600 - DNA, 1053 bp, Salmonella enterica subsp. enterica serovar Typhi Ty2; identical to SEQ ID NO: 75404
  CDS (1)..(1053): transl_table=11

SEQ ID NO: 156601 - protein, 350 aa, Salmonella enterica subsp. enterica serovar Typhi Ty2; identical to SEQ ID NO: 75405

SEQ ID NO: 156602 - DNA, 1083 bp, Coxiella burnetii RSA 493; identical to SEQ ID NO: 75406
  CDS (1)..(1083): transl_table=11

SEQ ID NO: 156603 - protein, 360 aa, Coxiella burnetii RSA 493; identical to SEQ ID NO: 75407

SEQ ID NO: 156604 - DNA, 1179 bp, Nitrosomonas europaea ATCC 19718; identical to SEQ ID NO: 75408
  CDS (1)..(1179): transl_table=11

SEQ ID NO: 156605 - protein, 392 aa, Nitrosomonas europaea ATCC 19718; identical to SEQ ID NO: 75409

SEQ ID NO: 156606 - DNA, 1053 bp, Rhodopirellula baltica SH 1; identical to SEQ ID NO: 75410
  CDS (1)..(1053): transl_table=11

SEQ ID NO: 156607 - protein, 350 aa, Rhodopirellula baltica SH 1; identical to SEQ ID NO: 75411

SEQ ID NO: 156608 - DNA, 1038 bp, Wigglesworthia glossinidia endosymbiont of Glossina brevipalpis; identical to SEQ ID NO: 75412
  CDS (1)..(1038): transl_table=11

SEQ ID NO: 156609 - protein, 345 aa, Wigglesworthia glossinidia endosymbiont of Glossina brevipalpis; identical to SEQ ID NO: 75413

SEQ ID NO: 156610 - DNA, 1113 bp, Haemophilus ducreyi 35000HP; identical to SEQ ID NO: 75416
  CDS (1)..(1113): transl_table=11

SEQ ID NO: 156611 - protein, 370 aa, Haemophilus ducreyi 35000HP; identical to SEQ ID NO: 75417

SEQ ID NO: 156612 - DNA, 1086 bp, Candidatus Blochmannia floridanus; identical to SEQ ID NO: 75420
  CDS (1)..(1086): transl_table=11

SEQ ID NO: 156613 - protein, 361 aa, Candidatus Blochmannia floridanus; identical to SEQ ID NO: 75421

SEQ ID NO: 156614 - DNA, 1074 bp, Bordetella bronchiseptica RB50; identical to SEQ ID NO: 75426
  CDS (1)..(1074): transl_table=11

SEQ ID NO: 156615 - protein, 357 aa, Bordetella bronchiseptica RB50; identical to SEQ ID NO: 75427

SEQ ID NO: 156616 - DNA, 1083 bp, Prochlorococcus marinus str. MIT 9313; identical to SEQ ID NO: 75432
  CDS (1)..(1083): transl_table=11

SEQ ID NO: 156617 - protein, 360 aa, Prochlorococcus marinus str. MIT 9313; identical to SEQ ID NO: 75433

SEQ ID NO: 156618 - DNA, 1059 bp, Chromobacterium violaceum ATCC 12472; identical to SEQ ID NO: 75436
  CDS (1)..(1059): transl_table=11

SEQ ID NO: 156619 - protein, 352 aa, Chromobacterium violaceum ATCC 12472; identical to SEQ ID NO: 75437

SEQ ID NO: 156620 - DNA, 1119 bp, Gloeobacter violaceus PCC 7421; identical to SEQ ID NO: 75440
  CDS (1)..(1119): transl_table=11

SEQ ID NO: 156621 - protein, 372 aa, Gloeobacter violaceus PCC 7421; identical to SEQ ID NO: 75441

SEQ ID NO: 156622 - DNA, 1053 bp, Photorhabdus luminescens subsp. laumondii TTO1; identical to SEQ ID NO: 75444
  CDS (1)..(1053): transl_table=11

SEQ ID NO: 156623 - protein, 350 aa, Photorhabdus luminescens subsp. laumondii TTO1; identical to SEQ ID NO: 75445

SEQ ID NO: 156624 - DNA, 1047 bp, Photorhabdus luminescens subsp. laumondii TTO1; identical to SEQ ID NO: 75446
  CDS (1)..(1047): transl_table=11

SEQ ID NO: 156625 - protein, 348 aa, Photorhabdus luminescens subsp. laumondii TTO1; identical to SEQ ID NO: 75447

SEQ ID NO: 156626 - DNA, 1095 bp, Rhodopseudomonas palustris CGA009; identical to SEQ ID NO: 75456
  CDS (1)..(1095): transl_table=11

SEQ ID NO: 156627 - protein, 364 aa, Rhodopseudomonas palustris CGA009; identical to SEQ ID NO: 75457

SEQ ID NO: 156628 - DNA, 1068 bp, Geobacter sulfurreducens PCA; identical to SEQ ID NO: 75458
  CDS (1)..(1068): transl_table=11

SEQ ID NO: 156629 - protein, 355 aa, Geobacter sulfurreducens PCA; identical to SEQ ID NO: 75459

SEQ ID NO: 156630 - DNA, 1071 bp, Treponema denticola ATCC 35405; identical to SEQ ID NO: 75460
  CDS (1)..(1071): transl_table=11

SEQ ID NO: 156631 - protein, 356 aa, Treponema denticola ATCC 35405; identical to SEQ ID NO: 75461

SEQ ID NO: 156632 - DNA, 1113 bp, Magnaporthe grisea 70-15; identical to SEQ ID NO: 75462
  CDS (1)..(1113)

SEQ ID NO: 156633 - protein, 370 aa, Magnaporthe grisea 70-15; identical to SEQ ID NO: 75463

SEQ ID NO: 156634 - DNA, 1152 bp, Magnaporthe grisea 70-15; identical to SEQ ID NO: 75464
  CDS (1)..(1152)

SEQ ID NO: 156635 - protein, 383 aa, Magnaporthe grisea 70-15; identical to SEQ ID NO: 75465

SEQ ID NO: 156636 - DNA, 1128 bp, Gibberella zeae PH-1; identical to SEQ ID NO: 75466
  CDS (1)..(1128)

SEQ ID NO: 156637 - protein, 375 aa, Gibberella zeae PH-1; identical to SEQ ID NO: 75467

SEQ ID NO: 156638 - DNA, 1098 bp, Gibberella zeae PH-1; identical to SEQ ID NO: 75468
  CDS (1)..(1098)

SEQ ID NO: 156639 - protein, 365 aa, Gibberella zeae PH-1; identical to SEQ ID NO: 75469

SEQ ID NO: 156640 - DNA, 1071 bp, Candida glabrata CBS 138; identical to SEQ ID NO: 75470
  CDS (1)..(1071)

SEQ ID NO: 156641 - protein, 356 aa, Candida glabrata CBS 138; identical to SEQ ID NO: 75471

SEQ ID NO: 156642 - DNA, 1119 bp, Candida glabrata CBS 138; identical to SEQ ID NO: 75472
  CDS (1)..(1119)

SEQ ID NO: 156643 - protein, 372 aa, Candida glabrata CBS 138; identical to SEQ ID NO: 75473

SEQ ID NO: 156644 - DNA, 1095 bp, Kluyveromyces lactis NRRL Y-1140; identical to SEQ ID NO: 75474
  CDS (1)..(1095)

SEQ ID NO: 156645 - protein, 364 aa, Kluyveromyces lactis NRRL Y-1140; identical to SEQ ID NO: 75475

SEQ ID NO: 156646 - DNA, 1119 bp, Kluyveromyces lactis NRRL Y-1140; identical to SEQ ID NO: 75476
  CDS (1)..(1119)

SEQ ID NO: 156647 - protein, 372 aa, Kluyveromyces lactis NRRL Y-1140; identical to SEQ ID NO: 75477

SEQ ID NO: 156648 - DNA, 1107 bp, Debaryomyces hansenii CBS767; identical to SEQ ID NO: 75478
  CDS (1)..(1107)

SEQ ID NO: 156649 - protein, 368 aa, Debaryomyces hansenii CBS767; identical to SEQ ID NO: 75479

SEQ ID NO: 156650 - DNA, 1122 bp, Debaryomyces hansenii CBS767; identical to SEQ ID NO: 75480
  CDS (1)..(1122)

SEQ ID NO: 156651 - protein, 373 aa, Debaryomyces hansenii CBS767; identical to SEQ ID NO: 75481

SEQ ID NO: 156652 - DNA, 1089 bp, Yarrowia lipolytica CLIB122; identical to SEQ ID NO: 75482
  CDS (1)..(1089)

SEQ ID NO: 156653 - protein, 362 aa, Yarrowia lipolytica CLIB122; identical to SEQ ID NO: 75483

SEQ ID NO: 156654 - DNA, 1074 bp, Yarrowia lipolytica CLIB122; identical to SEQ ID NO: 75484
  CDS (1)..(1074)

SEQ ID NO: 156655 - protein, 357 aa, Yarrowia lipolytica CLIB122; identical to SEQ ID NO: 75485

SEQ ID NO: 156656 - DNA, 1143 bp, Aspergillus nidulans FGSC A4; identical to SEQ ID NO: 75486
  CDS (1)..(1143)

SEQ ID NO: 156657 - protein, 380 aa, Aspergillus nidulans FGSC A4; identical to SEQ ID NO: 75487

SEQ ID NO: 156658 - DNA, 1089 bp, Aspergillus nidulans FGSC A4; identical to SEQ ID NO: 75488
  CDS (1)..(1089)

SEQ ID NO: 156659 - protein, 362 aa, Aspergillus nidulans FGSC A4; identical to SEQ ID NO: 75489

SEQ ID NO: 156660 - DNA, 1182 bp, Ustilago maydis 521; identical to SEQ ID NO: 75490
  CDS (1)..(1182)

SEQ ID NO: 156661 - protein, 393 aa, Ustilago maydis 521; identical to SEQ ID NO: 75491

SEQ ID NO: 156662 - DNA, 1560 bp, Ustilago maydis 521; identical to SEQ ID NO: 75492
  CDS (1)..(1560)

SEQ ID NO: 156663 - protein, 519 aa, Ustilago maydis 521; identical to SEQ ID NO: 75493

SEQ ID NO: 156664 - DNA, 1131 bp, Cryptococcus neoformans var. neoformans B-3501A; identical to SEQ ID NO: 75494
  CDS (1)..(1131)

SEQ ID NO: 156665 - protein, 376 aa, Cryptococcus neoformans var. neoformans B-3501A; identical to SEQ ID NO: 75495

SEQ ID NO: 156666 - DNA, 1065 bp, Herminiimonas arsenicoxydans; identical to SEQ ID NO: 75508
  CDS (1)..(1065): transl_table=11

SEQ ID NO: 156667 - protein, 354 aa, Herminiimonas arsenicoxydans; identical to SEQ ID NO: 75509

SEQ ID NO: 156668 - DNA, 1092 bp, Candidatus Protochlamydia amoebophila UWE25; identical to SEQ ID NO: 75518
  CDS (1)..(1092): transl_table=11

SEQ ID NO: 156669 - protein, 363 aa, Candidatus Protochlamydia amoebophila UWE25; identical to SEQ ID NO: 75519

SEQ ID NO: 156670 - DNA, 1113 bp, Acinetobacter sp. ADP1; identical to SEQ ID NO: 75522
  CDS (1)..(1113): transl_table=11

SEQ ID NO: 156671 - protein, 370 aa, Acinetobacter sp. ADP1; identical to SEQ ID NO: 75523

SEQ ID NO: 156672 - DNA, 1056 bp, Erwinia carotovora subsp. atroseptica SCRI1043; identical to SEQ ID NO: 75524
  CDS (1)..(1056): transl_table=11

SEQ ID NO: 156673 - protein, 351 aa, Erwinia carotovora subsp. atroseptica SCRI1043; identical to SEQ ID NO: 75525

SEQ ID NO: 156674 - DNA, 1047 bp, Erwinia carotovora subsp. atroseptica SCRI1043; identical to SEQ ID NO: 75526
  CDS (1)..(1047): transl_table=11

SEQ ID NO: 156675 - protein, 348 aa, Erwinia carotovora subsp. atroseptica SCRI1043; identical to SEQ ID NO: 75527

SEQ ID NO: 156676 - DNA, 1047 bp, Yersinia pseudotuberculosis IP 32953; identical to SEQ ID NO: 75530
  CDS (1)..(1047): transl_table=11

SEQ ID NO: 156677 - protein, 348 aa, Yersinia pseudotuberculosis IP 32953; identical to SEQ ID NO: 75531

SEQ ID NO: 156678 - DNA, 1155 bp, Mannheimia succiniciproducens MBEL55E; identical to SEQ ID NO: 75534
  CDS (1)..(1155): transl_table=11

SEQ ID NO: 156679 - protein, 384 aa, Mannheimia succiniciproducens MBEL55E; identical to SEQ ID NO: 75535

SEQ ID NO: 156680 - DNA, 1074 bp, Burkholderia mallei ATCC 23344; identical to SEQ ID NO: 75536
  CDS (1)..(1074): transl_table=11

SEQ ID NO: 156681 - protein, 357 aa, Burkholderia mallei ATCC 23344; identical to SEQ ID NO: 75537

SEQ ID NO: 156682 - DNA, 1092 bp, Methylococcus capsulatus str. Bath; identical to SEQ ID NO: 75540
  CDS (1)..(1092): transl_table=11

SEQ ID NO: 156683 - protein, 363 aa, Methylococcus capsulatus str. Bath; identical to SEQ ID NO: 75541

SEQ ID NO: 156684 - DNA, 1083 bp, Psychrobacter arcticus 273-4; identical to SEQ ID NO: 75558
  CDS (1)..(1083): transl_table=11

SEQ ID NO: 156685 - protein, 360 aa, Psychrobacter arcticus 273-4; identical to SEQ ID NO: 75559

SEQ ID NO: 156686 - DNA, 1053 bp, Colwellia psychrerythraea 34H; identical to SEQ ID NO: 75562
  CDS (1)..(1053): transl_table=11

SEQ ID NO: 156687 - protein, 350 aa, Colwellia psychrerythraea 34H; identical to SEQ ID NO: 75563

SEQ ID NO: 156688 - DNA, 1080 bp, Dechloromonas aromatica RCB; identical to SEQ ID NO: 75572
  CDS (1)..(1080): transl_table=11

SEQ ID NO: 156689 - protein, 359 aa, Dechloromonas aromatica RCB; identical to SEQ ID NO: 75573

SEQ ID NO: 156690 - DNA, 1062 bp, Thermobifida fusca YX; identical to SEQ ID NO: 75574
  CDS (1)..(1062): transl_table=11

SEQ ID NO: 156691 - protein, 353 aa, Thermobifida fusca YX; identical to SEQ ID NO: 75575

SEQ ID NO: 156692 - DNA, 1071 bp, Prochlorococcus marinus str. NATL2A; identical to SEQ ID NO: 75576
  CDS (1)..(1071): transl_table=11

SEQ ID NO: 156693 - protein, 356 aa, Prochlorococcus marinus str. NATL2A; identical to SEQ ID NO: 75577

SEQ ID NO: 156694 - DNA, 1077 bp, Thiobacillus denitrificans ATCC 25259; identical to SEQ ID NO: 75582
  CDS (1)..(1077): transl_table=11

SEQ ID NO: 156695 - protein, 358 aa, Thiobacillus denitrificans ATCC 25259; identical to SEQ ID NO: 75583

SEQ ID NO: 156696 - DNA, 1131 bp, Anabaena variabilis ATCC 29413; identical to SEQ ID NO: 75584
  CDS (1)..(1131): transl_table=11

SEQ ID NO: 156697 - protein, 376 aa, Anabaena variabilis ATCC 29413; identical to SEQ ID NO: 75585

SEQ ID NO: 156698 - DNA, 1077 bp, Pseudomonas fluorescens PfO-1; identical to SEQ ID NO: 75590
  CDS (1)..(1077): transl_table=11

SEQ ID NO: 156699 - protein, 358 aa, Pseudomonas fluorescens PfO-1; identical to SEQ ID NO: 75591

SEQ ID NO: 156700 - DNA, 1113 bp, Francisella tularensis subsp. holarctica; identical to SEQ ID NO: 75610
  CDS (1)..(1113): transl_table=11

SEQ ID NO: 156701 - protein, 370 aa, Francisella tularensis subsp. holarctica; identical to SEQ ID NO: 75611

SEQ ID NO: 156702 - DNA, 1062 bp, Saccharophagus degradans 2-40; identical to SEQ ID NO: 75614
  CDS (1)..(1062): transl_table=11

SEQ ID NO: 156703 - protein, 353 aa, Saccharophagus degradans 2-40; identical to SEQ ID NO: 75615

SEQ ID NO: 156704 - DNA, 1083 bp, Methylobacillus flagellatus KT; identical to SEQ ID NO: 75616
  CDS (1)..(1083): transl_table=11

SEQ ID NO: 156705 - protein, 360 aa, Methylobacillus flagellatus KT; identical to SEQ ID NO: 75617

SEQ ID NO: 156706 - DNA, 1143 bp, Ralstonia metallidurans CH34; identical to SEQ ID NO: 75624
  CDS (1)..(1143): transl_table=11

SEQ ID NO: 156707 - protein, 380 aa, Ralstonia metallidurans CH34; identical to SEQ ID NO: 75625

SEQ ID NO: 156708 - DNA, 1056 bp, Acidobacteria bacterium Ellin345; identical to SEQ ID NO: 75626
  CDS (1)..(1056): transl_table=11

SEQ ID NO: 156709 - protein, 351 aa, Acidobacteria bacterium Ellin345; identical to SEQ ID NO: 75627

SEQ ID NO: 156710 - DNA, 1095 bp, Silicibacter sp. TM1040; identical to SEQ ID NO: 75628
  CDS (1)..(1095): transl_table=11

SEQ ID NO: 156711 - protein, 364 aa, Silicibacter sp. TM1040; identical to SEQ ID NO: 75629

SEQ ID NO: 156712 - DNA, 1062 bp, Rubrobacter xylanophilus DSM 9941; identical to SEQ ID NO: 75630
  CDS (1)..(1062): transl_table=11

SEQ ID NO: 156713 - protein, 353 aa, Rubrobacter xylanophilus DSM 9941; identical to SEQ ID NO: 75631

SEQ ID NO: 156714 - DNA, 1089 bp, Rhodococcus sp. RHA1; identical to SEQ ID NO: 75632
  CDS (1)..(1089): transl_table=11

SEQ ID NO: 156715 - protein, 362 aa, Rhodococcus sp. RHA1; identical to SEQ ID NO: 75633

SEQ ID NO: 156716 - DNA, 1080 bp, Haemophilus somnus 129PT; identical to SEQ ID NO: 75634
  CDS (1)..(1080): transl_table=11

SEQ ID NO: 156717 - protein, 359 aa, Haemophilus somnus 129PT; identical to SEQ ID NO: 75635

SEQ ID NO: 156718 - DNA, 1077 bp, Alkalilimnicola ehrlichei MLHE-1; identical to SEQ ID NO: 75648
  CDS (1)..(1077): transl_table=11

SEQ ID NO: 156719 - protein, 358 aa, Alkalilimnicola ehrlichei MLHE-1; identical to SEQ ID NO: 75649

SEQ ID NO: 156720 - DNA, 1062 bp, Rhizobium leguminosarum bv. viciae 3841; identical to SEQ ID NO: 75650
  CDS (1)..(1062): transl_table=11

SEQ ID NO: 156721 - protein, 353 aa, Rhizobium leguminosarum bv. viciae 3841; identical to SEQ ID NO: 75651

SEQ ID NO: 156722 - DNA, 1077 bp, Pseudomonas aeruginosa UCBPP-PA14; identical to SEQ ID NO: 75654
  CDS (1)..(1077): transl_table=11

SEQ ID NO: 156723 - protein, 358 aa, Pseudomonas aeruginosa UCBPP-PA14; identical to SEQ ID NO: 75655

SEQ ID NO: 156724 - DNA, 1086 bp, Azoarcus sp. BH72; identical to SEQ ID NO: 75668
  CDS (1)..(1086): transl_table=11

SEQ ID NO: 156725 - protein, 361 aa, Azoarcus sp. BH72; identical to SEQ ID NO: 75669

SEQ ID NO: 156726 - DNA, 1053 bp, Mycobacterium sp. KMS; identical to SEQ ID NO: 75670
  CDS (1)..(1053): transl_table=11

SEQ ID NO: 156727 - protein, 350 aa, Mycobacterium sp. KMS; identical to SEQ ID NO: 75671

SEQ ID NO: 156728 - DNA, 1119 bp, Acidovorax sp. JS42; identical to SEQ ID NO: 75676
  CDS (1)..(1119): transl_table=11

SEQ ID NO: 156729 - protein, 372 aa, Acidovorax sp. JS42; identical to SEQ ID NO: 75677

SEQ ID NO: 156730 - DNA, 1089 bp, Haemophilus influenzae R2846; identical to SEQ ID NO: 75680
  CDS (1)..(1089): transl_table=11

SEQ ID NO: 156731 - protein, 362 aa, Haemophilus influenzae R2846; identical to SEQ ID NO: 75681

SEQ ID NO: 156732 - DNA, 1071 bp, Prosthecochloris aestuarii DSM 271; identical to SEQ ID NO: 75684
  CDS (1)..(1071): transl_table=11

SEQ ID NO: 156733 - protein, 356 aa, Prosthecochloris aestuarii DSM 271; identical to SEQ ID NO: 75685

SEQ ID NO: 156734 - DNA, 1164 bp, Xylella fastidiosa Dixon; identical to SEQ ID NO: 75686
  CDS (1)..(1164): transl_table=11

SEQ ID NO: 156735 - protein, 387 aa, Xylella fastidiosa Dixon; identical to SEQ ID NO: 75687

SEQ ID NO: 156736 - DNA, 1065 bp, Synechococcus sp. WH 7805; identical to SEQ ID NO: 75700
  CDS (1)..(1065): transl_table=11

SEQ ID NO: 156737 - protein, 354 aa, Synechococcus sp. WH 7805; identical to SEQ ID NO: 75701

SEQ ID NO: 156738 - DNA, 1068 bp, Oceanospirillum sp. MED92; identical to SEQ ID NO: 75706
  CDS (1)..(1068): transl_table=11

SEQ ID NO: 156739 - protein, 355 aa, Oceanospirillum sp. MED92; identical to SEQ ID NO: 75707

SEQ ID NO: 156740 - DNA, 1068 bp, marine gamma proteobacterium HTCC2207; identical to SEQ ID NO: 75708
  CDS (1)..(1068): transl_table=11

SEQ ID NO: 156741 - protein, 355 aa, marine gamma proteobacterium HTCC2207; identical to SEQ ID NO: 75709

SEQ ID NO: 156742 - DNA, 1053 bp, Oceanobacter sp. RED65; identical to SEQ ID NO: 75710
  CDS (1)..(1053): transl_table=11

SEQ ID NO: 156743 - protein, 350 aa, Oceanobacter sp. RED65; identical to SEQ ID NO: 75711

SEQ ID NO: 156744 - DNA, 1062 bp, Synechococcus sp. RS9916; identical to SEQ ID NO: 75714
  CDS (1)..(1062): transl_table=11

SEQ ID NO: 156745 - protein, 353 aa, Synechococcus sp. RS9916; identical to SEQ ID NO: 75715

SEQ ID NO: 156746 - DNA, 1050 bp, marine gamma proteobacterium HTCC2143; identical to SEQ ID NO: 75718
  CDS (1)..(1050): transl_table=11

SEQ ID NO: 156747 - protein, 349 aa, marine gamma proteobacterium HTCC2143; identical to SEQ ID NO: 75719

SEQ ID NO: 156748 - DNA, 1071 bp, marine gamma proteobacterium HTCC2080; identical to SEQ ID NO: 75724
  CDS (1)..(1071): transl_table=11

SEQ ID NO: 156749 - protein, 356 aa, marine gamma proteobacterium HTCC2080; identical to SEQ ID NO: 75725

SEQ ID NO: 156750 - DNA, 1077 bp, Pseudomonas putida GB-1; identical to SEQ ID NO: 75728
  CDS (1)..(1077): transl_table=11

SEQ ID NO: 156751 - protein, 358 aa, Pseudomonas putida GB-1; identical to SEQ ID NO: 75729

SEQ ID NO: 156752 - DNA, 1077 bp, Marinobacter sp. ELB17; identical to SEQ ID NO: 75732
  CDS (1)..(1077): transl_table=11

SEQ ID NO: 156753 - protein, 358 aa, Marinobacter sp. ELB17; identical to SEQ ID NO: 75733

SEQ ID NO: 156754 - DNA, 1074 bp, Herbaspirillum seropedicae; identical to SEQ ID NO: 75734
  CDS (1)..(1074): transl_table=11

SEQ ID NO: 156755 - protein, 357 aa, Herbaspirillum seropedicae; identical to SEQ ID NO: 75735

SEQ ID NO: 156756 - DNA, 1836 bp, Oryza sativa subsp
  CDS (1)..(1836)
atgaaccgtaccttttccccggaagccggcggcgccggcatcgcctcccacgttccccacgcaacgccgcaacccggcacgcacgacaccacccgcatcgacgatacgcgcatcaaggcggtgcggccgctgatcacgcccgcgctgctgcaggagtggctgcccgcttcggacgatgcccaggccctggtggaatccagccgcgccgcgctttcgcgggtgctgcacggcgaggacgaccggctcatcgtcgtggtggggccgtgctccatccacgaccatggccaggccatggaatacgcgaaggcgctcaaggcacaggccgaccggctgtccgcggaactggtggtggtgatgcgggtgtatttcgagaagcctcgcaccacggtgggctggaaaggctacatcaatgatccgcacctggatggcagcttcgcgatcaacgaaggcctggaaatggcgcgcaagctgctgctggatgtgctggcgctcggcctgcccgtggggacggaattcctcgacctgctctcgccgcagttcatcagcgacctggtgagctggggcgcgatcggggcgcgcaccacggaaagccagagtcaccgccagctggccagcggcctgtcctgccccgtggggttcaagaacggcaccgatggcggcgtgaaggtggcctccgacgccatcctcgcagcacaggcgccgcacgccttcatgggcatgaccaagatgggtcaggccgccattttcgagacgcgcggcaaccgggactgccatgtgatcctgcgcggcggccgccagccgaactacggcgcggccgacgtggacgcggcctgctccctgctgcgcggcgcgggcctgcgagagcaggtgatgatcgatgtctcgcacgccaacagcagcaagcagcaccgccgccagatcgaggtggcggccgacgtggcggcgcaggtcgctgccggggacagccgcatcaccggcgtgatgatcgaaagccatctgcgggaaggccgccaggatatcgttcccgggcagcccctggaggccggcgtgtcggtgacggacgcctgcatcggcttcgaccagacggtgccggtgctcgaagggctcgcggccgccgggatggaagtcctcttcggcgttccgctgcatacgctgccacacgacagcacgtcctggacgcagcggctgcacccggacgacagcgaccgcgtgctcgagagcatccatgccgccatcgaaagcgacgccctgcactggatggacgaataccgcttccgccggcaggatggtacctatgcctggatccgcgaccgcggcttcgtgatccgcgatgcccaggggcagggcctgcgcatggtcggcgggatgaccgacatcagcgcccagaagcagagcgcgctgcaggcccagcgcgatgccggcgcgcatgcggagctggtgcgcgtgcagcagcgcatgagcgcgctcgacctgcccgtggaggaagtcctgctgctggcggcacgcaccgcgatggacctggcggacgggcagggcgccatggtcgtgctgcgcgagggcgaccggctgcgcgtgcgcgcgagtaccgggacgcgggccgcgccaatggacgaataccgcccgatgctcgggtacccgctctggcagcagctggaagccgagcagatggtgctgcacagcgatggctcgcagcagcatgcgcagttcgccaccgacgagggccagcacggcctgctgtcattcatcgccgcgccgctgcgcgccggtgacacggtgctgggcatgctcaagaagggcgtcggcggcatcggcaggagcatctcctctgagtactga

SEQ ID NO: 156757 - protein, 611 aa, Oryza sativa subsp
MNRTFSPEAGGAGIASHVPHATPQPGTHDTTRIDDTRIKAVRPLITPALLQEWLPASDDAQALVESSRAALSRVLHGEDDRLIVVVGPCSIHDHGQAMEYAKALKAQADRLSAELVVVMRVYFEKPRTTVGWKGYINDPHLDGSFAINEGLEMARKLLLDVLALGLPVGTEFLDLLSPQFISDLVSWGAIGARTTESQSHRQLASGLSCPVGFKNGTDGGVKVASDAILAAQAPHAFMGMTKMGQAAIFETRGNRDCHVILRGGRQPNYGAADVDAACSLLRGAGLREQVMIDVSHANSSKQHRRQIEVAADVAAQVAAGDSRITGVMIESHLREGRQDIVPGQPLEAGVSVTDACIGFDQTVPVLEGLAAAGMEVLFGVPLHTLPHDSTSWTQRLHPDDSDRVLESIHAAIESDALHWMDEYRFRRQDGTYAWIRDRGFVIRDAQGQGLRMVGGMTDISAQKQSALQAQRDAGAHAELVRVQQRMSALDLPVEEVLLLAARTAMDLADGQGAMVVLREGDRLRVRASTGTRAAPMDEYRPMLGYPLWQQLEAEQMVLHSDGSQQHAQFATDEGQHGLLSFIAAPLRAGDTVLGMLKKGVGGIGRSISSEY

SEQ ID NO: 156758 - DNA, 1089 bp, Amycolatopsis orientalis; identical to SEQ ID NO: 75736
  CDS (1)..(1089): transl_table=11

SEQ ID NO: 156759 - protein, 362 aa, Amycolatopsis orientalis; identical to SEQ ID NO: 75737

SEQ ID NO: 156760 - DNA, 1074 bp, Vibrio anguillarum; identical to SEQ ID NO: 75738
  CDS (1)..(1074): transl_table=11

SEQ ID NO: 156761 - protein, 357 aa, Vibrio anguillarum; identical to SEQ ID NO: 75739

SEQ ID NO: 156762 - DNA, 1104 bp, Phaeosphaeria nodorum; identical to SEQ ID NO: 113548
  CDS (1)..(1104)

SEQ ID NO: 156763 - protein, 367 aa, Phaeosphaeria nodorum; identical to SEQ ID NO: 113549

SEQ ID NO: 156764 - DNA, 1182 bp, Ustilago hordei; identical to SEQ ID NO: 75742
  CDS (1)..(1182)

SEQ ID NO: 156765 - protein, 393 aa, Ustilago hordei; identical to SEQ ID NO: 75743

SEQ ID NO: 156766 - DNA, 1065 bp, Pasteurella piscicida; identical to SEQ ID NO: 75744
  CDS (1)..(1065): transl_table=11

SEQ ID NO: 156767 - protein, 354 aa, Pasteurella piscicida; identical to SEQ ID NO: 75745

SEQ ID NO: 156768 - DNA, 1137 bp, Aspergillus oryzae; identical to SEQ ID NO: 75746
  CDS (1)..(1137)

SEQ ID NO: 156769 - protein, 378 aa, Aspergillus oryzae; identical to SEQ ID NO: 75747

SEQ ID NO: 156770 - DNA, 1095 bp, Aspergillus oryzae; identical to SEQ ID NO: 75748
  CDS (1)..(1095)

SEQ ID NO: 156771 - protein, 364 aa, Aspergillus oryzae; identical to SEQ ID NO: 75749

SEQ ID NO: 156772 - DNA, 1466 bp, Paxillus involutus; identical to SEQ ID NO: 75750
  CDS (67)..(1239)

SEQ ID NO: 156773 - protein, 390 aa, Paxillus involutus; identical to SEQ ID NO: 75751

SEQ ID NO: 156774 - DNA, 1100 bp, Amycolatopsis methanolica
  CDS (1)..(1086): transl_table=11
atgtctctcagcgcaggccccgcggaaatttccgaaggcctcgacaaccagcgcaccctcggcgtcagcccgctgatctcccccgccctgctgcggcaggagctgccggtggacgcggcgatcgccaagaccgtcgcgcatggccggtcgtcggccgtcgacatcctccacggcgacgacgaccgcctcatcgtggtcgtcggcccctgctcggtgcacgaccccgcggccgccctcgactacgcccaccggctggccgagcacgccgccggtgtgcgcgacgaactgcacgtgatcatgcgggtgtacttcgagaagccacgcaccacgctgggctggaagggcctcatcaacgacccggacctggacggcagctacgccgtcaacaagggcctgcggatggcgcgcaagctgctgctggacatctccgcactggggctgccggtcgggtgcgagttcctggacccgatcacgccgcagttcatcgccgacaccgtgagctggggatccatcggcgcgcggaccgcggccagccaggtgcaccgccagctgtgcagcgcgctgtccatgccggtggggatcaagaactccactgagggcgatgtgcaggtggcggtggacgcgacccgcgcggcggcggcgagccacgtgttcgcgggcatcaacaacgacggcctggcggcgctgttcaccacggcgggcaacccggactgccacgtcatcctgcgcggcggttccgcaggcccgaactacgacgcggcgacggtggccgacacgctcgcgcggcaggccaaggccgggctgccggagcgggtgatcatcgacgcgagccacggcaacagcggcaaggaccacgtccgccagggcgtggtggccggggagatcgcggaccggatcgccgccggcgagcgcgggatcgccgggatcatgctggagagcttcctcgaggccgggcggcaggacctggtgctggggcacgcgggcgagctgacctacgggcagtcgatcaccgatgcgtgcctggactggcgaagcacgggtgagctgctggaccgcctctcggaggcggtggcggcgcggcggtgaggggggctacgcgg

SEQ ID NO: 156775 - protein, 361 aa, Amycolatopsis methanolica; identical to SEQ ID NO: 75755

SEQ ID NO: 156776 - DNA, 1200 bp, Stigmatella aurantiaca
  CDS (62)..(1147): transl_table=11
aattcagcgaaaccttggaatcgggccccctccatcggccaagatggcggcgagaccgcacatgaccgctcgcactgaaaatctgaacgtagttggtttcgaccacatgccctccccctccgagatcaaggagcgcgtgccgatgacaagcctcgcagccgacaccgtgctctccggacggcgcgcgctgatggacatcctcaaccgcaaggatccacgcatcttcgtcatcgtgggcccctgctccatacatgatcccaaggccggcatcgagtacgcccgtcgacttcgcaacctctccgacgagatccgggagacgatcctcgtggtgatgcgggtgtacttcgagaaaccgcgcacctccaccggctggaagggcttcatcaacgacccgaggatggacgactccttccacatcgaggaaggcatggagcggggccgccgcttcttgagggacgtggccgaactgggcctgcccgcggcgaccgaagcgctcgatcccattgccccccagtattacggcgacctgatttcctggacggcgattggcgcgcgcacggcggagtcccagacccaccgcgagatggcctcggggctgtcgacgcccgtgggcttcaagaacggaaccgacggctcgctggacgcggcggtcaacggcatcctctccgcctcgcacccccacagcttcctggggctgaacgagggcggtgaggcggcgatcatccgcaccggaggcaatgcctacagccacctggtgctccgaggcggagggggacggcccaactacgacacggtgtccatcgcgctcgccgaacaggcgctcaccaaggccaagctgccggggaacatcgtggtggactgctcccacgccaactcctggaagaagccggagttgcagcccctggtcatgcgcgacgtggtgcaccagatccgcgaaggcaaccgctccgtggtgggtttgatgctcgaaagcttcctggaagcgggcaaccagcccatccccgccgatctctcgaagctgcgctacggctgctcggtgaccgatgcgtgcgtggactggggcaccaccgaagagacgctgcgcaacgcccacaaggtgctgcgcgaggcattgcccacgcggagctcgggccgcccagcgccctgaacttgcgccccacccctctccgccctgctcgggggcggagaggcgctgtcaca

SEQ ID NO: 156777 - protein, 361 aa, Stigmatella aurantiaca; identical to SEQ ID NO: 75761

SEQ ID NO: 156778 - DNA, 1083 bp, Amycolatopsis mediterranei; identical to SEQ ID NO: 75762
  CDS (1)..(1083): transl_table=11

SEQ ID NO: 156779 - protein, 360 aa, Amycolatopsis mediterranei; identical to SEQ ID NO: 75763

SEQ ID NO: 156780 - DNA, 1125 bp, Emericella nidulans; identical to SEQ ID NO: 75764
  CDS (1)..(1125)

SEQ ID NO: 156781 - protein, 374 aa, Emericella nidulans; identical to SEQ ID NO: 75765

SEQ ID NO: 156782 - DNA, 1502 bp, Candida albicans; identical to SEQ ID NO: 89279
  CDS (336)..(1442): transl_table=12

SEQ ID NO: 156783 - protein, 368 aa, Candida albicans; identical to SEQ ID NO: 75767

SEQ ID NO: 156784 - DNA, 1107 bp, Schizosaccharomyces pombe; identical to SEQ ID NO: 75772
  CDS (1)..(1107)

SEQ ID NO: 156785 - protein, 368 aa, Schizosaccharomyces pombe; identical to SEQ ID NO: 75773

SEQ ID NO: 156786 - DNA, 1113 bp, Saccharomyces cerevisiae; identical to SEQ ID NO: 75774
  CDS (1)..(1113)

SEQ ID NO: 156787 - protein, 370 aa, Saccharomyces cerevisiae; identical to SEQ ID NO: 75775

SEQ ID NO: 156788 - DNA, 1113 bp, Candida albicans; identical to SEQ ID NO: 75776
  CDS (1)..(1113): transl_table=12

SEQ ID NO: 156789 - protein, 370 aa, Candida albicans; identical to SEQ ID NO: 75777

SEQ ID NO: 156790 - DNA, 1053 bp, Escherichia coli O157; identical to SEQ ID NO: 113578
  CDS (1)..(1053): transl_table=11

SEQ ID NO: 156791 - protein, 350 aa, Escherichia coli O157; identical to SEQ ID NO: 75287

SEQ ID NO: 156792 - DNA, 2048 bp, Saccharomyces cerevisiae
  CDS (619)..(1731)
gtatacagctagccttgaaagtgatggaaaacattgtcatcggcacataaataaaaaaattatgaatcacgtgatcaacagcaaattatgtactcgtatatatgcaagcgcattccttatattgacactctttcattgggcatgaggctgtgtaaacataagctgtaacggtctcacggaacactgtgtagttgcattactgtcaggcagttatgttgcttaatataaaggcaaaggcatggcagaatcactttaaaacgtggccccacccgctgcaccctgtgcattttgtacgttactgcgaaatgactcaacgatgaaatgaaaaaattttgcttgaaattttgaaaaaaagatgtgcgggacgcattgttagctcattgaatacatcgtgatcgaatccaatcaatgtttaatttcatattaatacagaaactttttctcatactttcttcttcttttcattggtatattatctatatatcgtgttaattcctctttcgtcatttttagcatcgttataagagtaattaagaataactagaagagtctctctttatattcgtttattttatatatttaaccgctaaatttagtaaacaaaagaatctatcagaaatgagtgaatctccaatgttcgctgccaacggcatgccaaaggtaaatcaaggtgctgaagaagatgtcagaattttaggttacgacccattagcttctccagctctccttcaagtgcaaatcccagccacaccaacttctttggaaactgccaagagaggtagaagagaagctatagatattattaccggtaaagacgacagagttcttgtcattgtcggtccttgttccatccatgatctagaagccgctcaagaatacgctttgagattaaagaaattgtcagatgaattaaaaggtgatttatccatcattatgagagcatacttggagaagccaagaacaaccgtcggctggaaaggtctaattaatgaccctgatgttaacaacactttcaacatcaacaagggtttgcaatccgctagacaattgtttgtcaacttgacaaatatcggtttgccaattggttctgaaatgcttgataccatttctcctcaatacttggctgatttggtctccttcggtgccattggtgccagaaccaccgaatctcaactgcacagagaattggcctccggtttgtctttcccagttggtttcaagaacggtaccgatggtaccttaaatgttgctgtggatgcttgtcaagccgctgctcattctcaccatttcatgggtgttactaagcatggtgttgctgctatcaccactactaagggtaacgaacactgcttcgttattctaagaggtggtaaaaagggtaccaactacgacgctaagtccgttgcagaagctaaggctcaattgcctgccggttccaacggtctaatgattgactactctcacggtaactccaataaggatttcagaaaccaaccaaaggtcaatgacgttgtttgtgagcaaatcgctaacggtgaaaacgccattaccggtgtcatgattgaatcaaacatcaacgaaggtaaccaaggcatcccagccgaaggtaaagccggcttgaaatatggtgtttccatcactgatgcttgtataggttgggaaactactgaagacgtcttgaggaaattggctgctgctgtcagacaaagaagagaagttaacaagaaatagatgtttttttaatgatatatgtaacgtacattctttcctctaccactgccaattcggtattatttaattgtgtttagcgctatttactaattaactagaaactcaatttttaaaggcaaagctcgctgacctttcactgatttcgtggatgttatactatcagttactcttctgcaaaaaaaaattgagtcatatcgtagctttgggattatttttctctctctccacggctaattaggtgatcatgaaaaaatgaaaaattcatgagaaaagagtcagacatcgaaacatacataagttgatattcctttgatatc

SEQ ID NO: 156793 - protein, 370 aa, Saccharomyces cerevisiae; identical to SEQ ID NO: 75781

SEQ ID NO: 156794 - DNA, 1047 bp, Enterobacter agglomerans; identical to SEQ ID NO: 75790
  CDS (1)..(1047): transl_table=11

SEQ ID NO: 156795 - protein, 348 aa, Enterobacter agglomerans; identical to SEQ ID NO: 75791

SEQ ID NO: 156796 - DNA, 1047 bp, Salmonella typhimurium; identical to SEQ ID NO: 75792
  CDS (1)..(1047): transl_table=11

SEQ ID NO: 156797 - protein, 348 aa, Salmonella typhimurium; identical to SEQ ID NO: 75793

SEQ ID NO: 156798 - DNA, 1047 bp, Shigella flexneri; identical to SEQ ID NO: 75794
  CDS (1)..(1047): transl_table=11

SEQ ID NO: 156799 - protein, 348 aa, Shigella flexneri; identical to SEQ ID NO: 75795

SEQ ID NO: 156800 - DNA, 23 bp, Artificial sequence
  primer
atgaacagaactgacgaactccg

SEQ ID NO: 156801 - DNA, 24 bp, Artificial sequence
  primer
ttagaagcgggtatctaccgcaga

SEQ ID NO: 156802 - protein, 356 aa, Artificial sequence
  consensus sequence
  Variant (2)..(3): Xaa in position 2 to 3 is any amino acid
  Variant (5)..(11): Xaa in position 5 to 11 is any amino acid
  Variant (13)..(24): Xaa in position 13 to 24 is any amino acid
  Variant (25)..(25): Xaa in position 25 is any or no amino acid
  Variant (27)..(31): Xaa in position 27 to 31 is any amino acid
  Variant (33)..(34): Xaa in position 33 to 34 is any amino acid
  Variant (36)..(36): Xaa in position 36 is any amino acid
  Variant (38)..(38): Xaa in position 38 is any amino acid
  Variant (39)..(41): Xaa in position 39 to 41 is any or no amino acid
  Variant (44)..(44): Xaa in position 44 is any amino acid
  Variant (46)..(47): Xaa in position 46 to 47 is any amino acid
  Variant (55)..(57): Xaa in position 55 to 57 is any amino acid
  Variant (59)..(60): Xaa in position 59 to 60 is any amino acid
  Variant (63)..(64): Xaa in position 63 to 64 is any amino acid
  Variant (66)..(74): Xaa in position 66 to 74 is any amino acid
  Variant (75)..(77): Xaa in position 75 to 77 is any or no amino acid
  Variant (79)..(81): Xaa in position 79 to 81 is any amino acid
  Variant (84)..(84): Xaa in position 84 is any amino acid
  Variant (86)..(86): Xaa in position 86 is any amino acid
  Variant (93)..(93): Xaa in position 93 is any amino acid
  Variant (94)..(94): Xaa in position 94 is any or no amino acid
  Variant (104)..(113): Xaa in position 104 to 113 is any amino acid
  Variant (116)..(118): Xaa in position 116 to 118 is any amino acid
  Variant (120)..(120): Xaa in position 120 is any amino acid
  Variant (122)..(128): Xaa in position 122 to 128 is any amino acid
  Variant (129)..(129): Xaa in position 129 is any or no amino acid
  Variant (131)..(131): Xaa in position 131 is any amino acid
  Variant (133)..(135): Xaa in position 133 to 135 is any amino acid
  Variant (137)..(137): Xaa in position 137 is any amino acid
  Variant (140)..(142): Xaa in position 140 to 142 is any amino acid
  Variant (145)..(147): Xaa in position 145 to 147 is any amino acid
  Variant (149)..(153): Xaa in position 149 to 153 is any amino acid
  Variant (164)..(164): Xaa in position 164 is any amino acid
  Variant (168)..(168): Xaa in position 168 is any amino acid
  Variant (174)..(174): Xaa in position 174 is any amino acid
  Variant (176)..(176): Xaa in position 176 is any amino acid
  Variant (183)..(183): Xaa in position 183 is any amino acid
  Variant (185)..(188): Xaa in position 185 to 188 is any amino acid
  Variant (190)..(191): Xaa in position 190 to 191 is any amino acid
  Variant (193)..(199): Xaa in position 193 to 199 is any amino acid
  Variant (201)..(201): Xaa in position 201 is any amino acid
  Variant (203)..(206): Xaa in position 203 to 206 is any amino acid
  Variant (207)..(208): Xaa in position 207 to 208 is any or no amino acid
  Variant (210)..(213): Xaa in position 210 to 213 is any amino acid
  Variant (214)..(215): Xaa in position 214 to 215 is any or no amino acid
  Variant (217)..(217): Xaa in position 217 is any amino acid
  Variant (220)..(222): Xaa in position 220 to 222 is any amino acid
  Variant (224)..(225): Xaa in position 224 to 225 is any amino acid
  Variant (230)..(232): Xaa in position 230 to 232 is any amino acid
  Variant (233)..(238): Xaa in position 233 to 238 is any or no amino acid
  Variant (241)..(258): Xaa in position 241 to 258 is any amino acid
  Variant (259)..(269): Xaa in position 259 to 269 is any or no amino acid
  Variant (271)..(271): Xaa in position 271 is any amino acid
  Variant (274)..(274): Xaa in position 274 is any amino acid
  Variant (277)..(277): Xaa in position 277 is any amino acid
  Variant (279)..(282): Xaa in position 279 to 282 is any amino acid
  Variant (284)..(285): Xaa in position 284 to 285 is any amino acid
  Variant (287)..(292): Xaa in position 287 to 292 is any amino acid
  Variant (294)..(296): Xaa in position 294 to 296 is any amino acid
  Variant (298)..(299): Xaa in position 298 to 299 is any amino acid
  Variant (300)..(303): Xaa in position 300 to 303 is any or no amino acid
  Variant (305)..(305): Xaa in position 305 is any amino acid
  Variant (307)..(307): Xaa in position 307 is any amino acid
  Variant (309)..(309): Xaa in position 309 is any amino acid
  Variant (312)..(315): Xaa in position 312 to 315 is any amino acid
  Variant (317)..(317): Xaa in position 317 is any amino acid
  Variant (319)..(321): Xaa in position 319 to 321 is any amino acid
  Variant (322)..(332): Xaa in position 322 to 332 is any or no amino acid
  Variant (334)..(334): Xaa in position 334 is any amino acid
  Variant (337)..(337): Xaa in position 337 is any amino acid
  Variant (339)..(339): Xaa in position 339 is any amino acid
  Variant (342)..(342): Xaa in position 342 is any amino acid
  Variant (344)..(345): Xaa in position 344 to 345 is any amino acid
  Variant (347)..(348): Xaa in position 347 to 348 is any amino acid
  Variant (350)..(352): Xaa in position 350 to 352 is any amino acid
  Variant (354)..(355): Xaa in position 354 to 355 is any amino acid
LXXPXXXXXXXPXXXXXXXXXXXXXRXXXXXIXXGXDXXXXRLXVXXGPCSIHDXXXAXXYAXXLXXXXXXXXXXXXLXXXMRXYXEKPRTTXXGWKGLINDPXXXXXXXXXXGLXXXRXLXXXXXXXXGXPXXXEXLDXXXPQXXXDXXXXXAIGARTTESQXHREXASGLSXPXGFKNGTXGXXXXAXXAXXXXXXXHXFXXXXXXGXXXXXXTXGNXXXHXXLRGGXXXXXXXXXNYXXXXXXXXXXXXXXXXXXXXXXXXXXXXXDXSHXNSXKXXXXQXXVXXXXXXQXXXGXXXXXXIXGXMXESXXXXGXQXXXXXXXXXXXXXXLXYGXSXTDXCXXWXXTXXXLXXL

SEQ ID NO: 156803 - protein, 41 aa, Artificial sequence
  protein pattern
  Variant (2)..(2): Xaa in position 2 is Phe or Tyr
  Variant (3)..(3): Xaa in position 3 is any amino acid
  Variant (4)..(4): Xaa in position 4 is Ala, Gly, Gln or Ser
  Variant (5)..(5): Xaa in position 5 is Asp or Glu
  Variant (6)..(7): Xaa in position 6 to 7 is any amino acid
  Variant (8)..(8): Xaa in position 8 is Ala, Cys, Gly, Ser or Thr
  Variant (9)..(9): Xaa in position 9 is any amino acid
  Variant (10)..(10): Xaa in position 10 is Ala, Gly, Ser or Thr
  Variant (12)..(12): Xaa in position 12 is Ile or Val
  Variant (21)..(21): Xaa in position 21 is any amino acid
  Variant (24)..(24): Xaa in position 24 is Glu or Gln
  Variant (25)..(25): Xaa in position 25 is Leu or Met
  Variant (26)..(26): Xaa in position 26 is Ala, Ser or Val
  Variant (28)..(28): Xaa in position 28 is Ala or Gly
  Variant (29)..(29): Xaa in position 29 is Ile, Leu, Met or Val
  Variant (31)..(31): Xaa in position 31 is any amino acid
  Variant (32)..(32): Xaa in position 32 is Ala, Pro or Ser
  Variant (33)..(33): Xaa in position 33 is Ile or Val
  Variant (35)..(35): Xaa in position 35 is Phe or Tyr
  Variant (38)..(40): Xaa in position 38 to 40 is any or no amino acid
QXXXXXXXXXAXGARTTESQXHRXXXSXXSXXXGXKNXXXG

SEQ ID NO: 156804 - protein, 22 aa, Artificial sequence
  protein pattern
  Variant (2)..(2): Xaa in position 2 is Ile, Leu, Met or Val
  Variant (3)..(3): Xaa in position 3 is any amino acid
  Variant (5)..(5): Xaa in position 5 is Ile, Met or Val
  Variant (6)..(6): Xaa in position 6 is any amino acid
  Variant (11)..(11): Xaa in position 11 is Ile or Val
  Variant (14)..(15): Xaa in position 14 to 15 is any amino acid
  Variant (16)..(16): Xaa in position 16 is any or no amino acid
  Variant (18)..(19): Xaa in position 18 to 19 is any amino acid
  Variant (20)..(20): Xaa in position 20 is any or no amino acid
  Variant (22)..(22): Xaa in position 22 is Ala, Cys or Gly
RXXVXXGPCSXHDXXXAXXXYX

SEQ ID NO: 156805 - protein, 16 aa, Artificial sequence
  protein pattern
  Variant (2)..(3): Xaa in position 2 to 3 is any amino acid
  Variant (4)..(4): Xaa in position 4 is any or no amino acid
  Variant (7)..(7): Xaa in position 7 is Ala, Thr or Val
  Variant (9)..(9): Xaa in position 9 is Phe or Leu
  Variant (15)..(15): Xaa in position 15 is Thr or Val
  Variant (16)..(16): Xaa in position 16 is Ile, Leu or Val
LXXXMRXYXEKPRTXX

SEQ ID NO: 156806 - protein, 18 aa, Artificial sequence
  protein pattern
  Variant (2)..(2): Xaa in position 2 is any amino acid
  Variant (4)..(4): Xaa in position 4 is Ile or Val
  Variant (7)..(7): Xaa in position 7 is Ala, Gly or Pro
  Variant (9)..(9): Xaa in position 9 is Ile, Leu or Val
  Variant (10)..(10): Xaa in position 10 is Asp, Gly, Asn or Ser
  Variant (11)..(11): Xaa in position 11 is Phe or Trp
  Variant (12)..(13): Xaa in position 12 to 13 is any amino acid
  Variant (14)..(14): Xaa in position 14 is Ser or Thr
  Variant (15)..(17): Xaa in position 15 to 17 is any amino acid
  Variant (18)..(18): Xaa in position 18 is Phe, Ile, Leu or Val
GXSXTDXCXXXXXXXXXX

SEQ ID NO: 156807 - protein, 19 aa, Artificial sequence
  protein pattern
  Variant (2)..(2): Xaa in position 2 is Asp, Glu, Asn or Ser
  Variant (3)..(4): Xaa in position 3 to 4 is any amino acid
  Variant (5)..(5): Xaa in position 5 is Ile, Leu or Val
  Variant (6)..(6): Xaa in position 6 is any amino acid
  Variant (8)..(8): Xaa in position 8 is Ile, Leu, Met or Val
  Variant (10)..(10): Xaa in position 10 is any amino acid
  Variant (13)..(13): Xaa in position 13 is any amino acid
  Variant (14)..(14): Xaa in position 14 is Ile or Leu
  Variant (15)..(16): Xaa in position 15 to 16 is any amino acid
  Variant (18)..(18): Xaa in position 18 is any amino acid
GXXXXXGXMXESXXXXGXQ

SEQ ID NO: 156808 - protein, 14 aa, Artificial sequence
  protein pattern
  Variant (2)..(2): Xaa in position 2 is Ile, Leu, Met or Val
  Variant (4)..(4): Xaa in position 4 is any amino acid
  Variant (5)..(5): Xaa in position 5 is Ala or Gly
  Variant (6)..(6): Xaa in position 6 is Ala, Cys, Gly, Ser, Thr or Val
  Variant (8)..(8): Xaa in position 8 is any amino acid
  Variant (10)..(10): Xaa in position 10 is Asp, Glu or Asn
  Variant (11)..(13): Xaa in position 11 to 13 is any amino acid
  Variant (14)..(14): Xaa in position 14 is Ala, Gly, Pro or Val
GXPXXXEXLXXXXX

SEQ ID NO: 156809 - protein, 21 aa, Artificial sequence
  protein pattern
  Variant (2)..(2): Xaa in position 2 is Ile, Leu or Val
  Variant (3)..(3): Xaa in position 3 is Asp, Glu or Asn
  Variant (4)..(4): Xaa in position 4 is Ala or Gly
  Variant (5)..(6): Xaa in position 5 to 6 is any amino acid
  Variant (7)..(8): Xaa in position 7 to 8 is Ala, Ser or Val
  Variant (9)..(11): Xaa in position 9 to 11 is any amino acid
  Variant (13)..(13): Xaa in position 13 is any amino acid
  Variant (15)..(15): Xaa in position 15 is any amino acid
  Variant (16)..(16): Xaa in position 16 is Ala, Gly, Ser or Thr
  Variant (17)..(20): Xaa in position 17 to 20 is any amino acid
AXXXXXXXXXXHXFXXXXXXG

SEQ ID NO: 156810 - DNA, 264 bp, ESCHERICHIA COLI
  CDS (1)..(264): transl_table=11
atgcacactaactggcaagtttgcagcctggtcgtgcaggccaaaagcgaacgaatttcagacatcagcacccaactgaacgcctttcccggctgtgaagttgctgtcagcgacgcgccgagcggtcagttgattgtggtggtggaagcagaagacagcgaaacgctgatccaaaccattgagtcagtacgcaacgtagagggcgtgctggcggtgtcgctggtttatcaccagcaggaagagcaaggtgaggaaacaccataa

SEQ ID NO: 156811 - protein, 87 aa, ESCHERICHIA COLI
MHTNWQVCSLVVQAKSERISDISTQLNAFPGCEVAVSDAPSGQLIVVVEAEDSETLIQTIESVRNVEGVLAVSLVYHQQEEQGEETP

SEQ ID NO: 156812 - DNA, 276 bp, Pasteurella multocida subsp. multocida str. Pm70
  CDS (1)..(276): transl_table=11
atgactgaacaaatcacaatggaaaatgcgaaaaattggcatgtctgtgggcttgtgattcaagggaatccccaaaaattagaagcaattcagaccgcacttttagcaataccgtatacggaaattcctgcattggacgcggaaaccggtaagcttgttgtggtgatgcaatcgcacgatcaacatcttttacatcaacaaatggaagcgacacgcgatattgacggcgtcattgacgtgtccttggtttaccatcaacaagacgaaaacgaataa

SEQ ID NO: 156813 - protein, 91 aa, Pasteurella multocida subsp. multocida str. Pm70
MTEQITMENAKNWHVCGLVIQGNPQKLEAIQTALLAIPYTEIPALDAETGKLVVVMQSHDQHLLHQQMEATRDIDGVIDVSLVYHQQDENE

SEQ ID NO: 156814 - DNA, 267 bp, Yersinia pestis CO92
  CDS (1)..(267): transl_table=11
atggacgataacgaatggcatgtttgtggattggtgctgcaagccaaaccggcacgttttgtgcagctgatggaccacctgctcgctatcccgggaacagaaatacccaccagtgaccctgctttgggcaagttggtggtggttatgcaggcagcgcgctcagacacgctcctgaatcatattgagtcagcacgtaatctggatggtgtgttggctgtatcgctggtttatcaccagcaggatttgcaaggtgaggaaatgccatga

SEQ ID NO: 156815 - protein, 88 aa, Yersinia pestis CO92
MDDNEWHVCGLVLQAKPARFVQLMDHLLAIPGTEIPTSDPALGKLVVVMQAARSDTLLNHIESARNLDGVLAVSLVYHQQDLQGEEMP

SEQ ID NO: 156816 - DNA, 282 bp, Haemophilus influenzae Rd KW20
  CDS (1)..(282): transl_table=11
  misc_feature (48)..(48): n is a, g, c or t
atgaataatacaaatttaatattagaaaatgcgagagattggcacgtngttggattgatcgtgcaaggtaatccaaaaaaattatcagcaattcaaaccgcacttttagcgattgagcatactgaaattccgactcttgatgaaaaacttggaaaatttgtggtggtaatgcaatcgaacgatcagcatctcttgcttgaaaaaatggaaagtgtgaaagatatcgacggtgtgattaatgtatcgttggtgtatcacgagcaagatgaacaaaataaatag

SEQ ID NO: 156817 - protein, 93 aa, Haemophilus influenzae Rd KW20
MNNTNLILENARDWHVVGLIVQGNPKKLSAIQTALLAIEHTEIPTLDEKLGKFVVVMQSNDQHLLLEKMESVKDIDGVINVSLVYHEQDEQNK

SEQ ID NO: 156818 - DNA, 264 bp, Salmonella enterica subsp. enterica serovar Typhi str. CT18
  CDS (1)..(264): transl_table=11
atgcgcactaactggcaggtctgtagcctggtcgtgcaggccaaaagtcagaacatcgccgccattggcacacagttgaacacgttgccgggttgcgaagtcgcgttaagcgacgttgaaagcgggcaactgatcgtggtggcggaagcagaccagagtgaaacgctgatgcaaacaattgagtcagtacgcaatgtcgagggcgtactggcggtgtcgctggtttatcaccagcaggatgagcaaggtgaggaaacaccatga

SEQ ID NO: 156819 - protein, 87 aa, Salmonella enterica subsp. enterica serovar Typhi str. CT18
MRTNWQVCSLVVQAKSQNIAAIGTQLNTLPGCEVALSDVESGQLIVVAEADQSETLMQTIESVRNVEGVLAVSLVYHQQDEQGEETP

SEQ ID NO: 156820 - DNA, 264 bp, Escherichia coli CFT073
  CDS (1)..(264): transl_table=11
atgcacactaactggcaagtttgcagcctggtcgtgcaggccaaaagcgaacgaatttcagacatcagcacccaactgaacgcctttaccggctgtgaagttgctgtcagcgacgcgccgagcggtcagttgattgtggtggtggaagcagaagacagcgaaacgctgatccaaaccattgagtcagtacgcaacgtagagggcgtgctggcggtgtcgctggtttatcaccagcaggaagagcaaggtgaggaaacaccatga

SEQ ID NO: 156821 - protein, 87 aa, Escherichia coli CFT073
MHTNWQVCSLVVQAKSERISDISTQLNAFTGCEVAVSDAPSGQLIVVVEAEDSETLIQTIESVRNVEGVLAVSLVYHQQEEQGEETP

SEQ ID NO: 156822 - DNA, 309 bp, Vibrio parahaemolyticus RIMD 2210633
  CDS (1)..(309): transl_table=11
atgtcactaaatgaagtgcatatttcaagtttggtagtgcacgtgctgcctgagcatctggatgaaattaagacgcaaattgaaacgtatgaaaacgcggaaatttacggagacagtccagaaggcaaaatcgttgtagtgcttgaaaccgaaaaccaaggtttcatcacagacactatcgatgccattaacaatttaccgaatgttttgagcacagtgttggtttatcaccaaatcgaaactgcgcttgaagaaacggatgaagaagacactggaacacaacattcccaaatcgagggtgaagtatga

SEQ ID NO: 156823 - protein, 102 aa, Vibrio parahaemolyticus RIMD 2210633
MSLNEVHISSLVVHVLPEHLDEIKTQIETYENAEIYGDSPEGKIVVVLETENQGFITDTIDAINNLPNVLSTVLVYHQIETALEETDEEDTGTQHSQIEGEV

SEQ ID NO: 156824 - DNA, 306 bp, Vibrio vulnificus YJ016
  CDS (1)..(306): transl_table=11
atggcactaaatgaagtgcatatttcaagtttagtggtacacgtagcccctgagcacctaggcacgataaagacgcagatcgaagccatcgagaacgcggaaatttatggtgatagcccagaaggcaaaatcgtcgtggttctggaaaccgaaaaccaaggtttcgttaccgacaccattgaaaccatcaacaatttaccgaacgttctcagcacggttctggtttatcaccaaattgaaaccgatctggatgacacggacgaagacactggaacacaacattcccaaatcgagggtgaagtatga

SEQ ID NO: 156825 - protein, 101 aa, Vibrio vulnificus YJ016
MALNEVHISSLVVHVAPEHLGTIKTQIEAIENAEIYGDSPEGKIVVVLETENQGFVTDTIETINNLPNVLSTVLVYHQIETDLDDTDEDTGTQHSQIEGEV

SEQ ID NO: 156826 - DNA, 267 bp, Yersinia enterocolitica subsp. enterocolitica 8081
  CDS (1)..(267): transl_table=11
atggacgataaagaatggcatgtctgtggattggtgatacaagccaagcctgcgcgaatagcgccacttattgacagcctgctggcgattccgggcacagaaatacccaccagtgataccgctctgggtaaattggtggtggttatgcaggcagcgcgctcagacgtgctcctgaattatattgagtcagcacgcaatctggatggtgtgctggctgtatcgctggtttatcaccagcaggaaagccaaggtgaggaaatgccatga

SEQ ID NO: 156827 - protein, 88 aa, Yersinia enterocolitica subsp. enterocolitica 8081
MDDKEWHVCGLVIQAKPARIAPLIDSLLAIPGTEIPTSDTALGKLVVVMQAARSDVLLNYIESARNLDGVLAVSLVYHQQESQGEEMP

SEQ ID NO: 156828 - DNA, 258 bp, Shewanella baltica OS155
  CDS (1)..(258): transl_table=11
atgagcaacgaactccatatcaccagtttagtggtgcaggtcttaccgcagaaaatggcagacgttagacaagagatcatgaccattgaaaatgccgaactttccgtcaacaacgaagtgaagttggtcgtagtcatcgagggcgagactcagcgcgccttgatggacagtatagaagcgatcaatgccattccgggcgtgttatccgccactatggtttaccaccagagtgaagtgctcgaagagggtgaagaatga

SEQ ID NO: 156829 - protein, 85 aa, Shewanella baltica OS155
MSNELHITSLVVQVLPQKMADVRQEIMTIENAELSVNNEVKLVVVIEGETQRALMDSIEAINAIPGVLSATMVYHQSEVLEEGEE

SEQ ID NO: 156830 - DNA, 270 bp, Shewanella loihica PV-4
  CDS (1)..(270): transl_table=11
atgacacaggaatatcatgtgaccagcctggtggtacacgccgcccccggccaggtcgcaaaagttacagaggatatcaacgcccttgcgggtgccgatattcacgccgtcaccgacgagggtaagttcatcattaccctggagggggccacccaaggtgcgatcctcgataacgtcgaagccatcaacgcccttagcggggtgttatcaagcagtcttgtctatcaccaagttgaaccaatagaagaaaagagtgaggaaacaccatga

SEQ ID NO: 156831 - protein, 89 aa, Shewanella loihica PV-4
MTQEYHVTSLVVHAAPGQVAKVTEDINALAGADIHAVTDEGKFIITLEGATQGAILDNVEAINALSGVLSSSLVYHQVEPIEEKSEETP

SEQ ID NO: 156832 - DNA, 267 bp, Yersinia pestis Pestoides F
  CDS (1)..(267): transl_table=11
atggacgataacgaatggcatgtttgtggattggtgctgcaagccaaaccggcacgttttgtgcagctgatggaccacctgctcgctatcccggaaacagaaatacccaccagtgaccctgctttgggcaagttggtggtggttatgcaggcagcgcgctcagacacgctcctgaatcatattgagtcagcacgtaatctggatggtgtgttggctgtatcgctggtttatcaccagcaggatttgcaaggtgaggaaatgccatga

SEQ ID NO: 156833 - protein, 88 aa, Yersinia pestis Pestoides F
MDDNEWHVCGLVLQAKPARFVQLMDHLLAIPETEIPTSDPALGKLVVVMQAARSDTLLNHIESARNLDGVLAVSLVYHQQDLQGEEMP

SEQ ID NO: 156834 - DNA, 282 bp, Haemophilus influenzae PittEE
  CDS (1)..(282): transl_table=11
atgaataatacaaatttaatatcagaaaatgcgggagattggcacgttgttggattgatcgtgcaaggtaatccaaaaaaactatcagcaattcaaaccgcacttttagcgattgagcatactgaaattccgacttttgatgaaaaacttgggaaatttgtggtggtaatgcaatcgcacgatcaacatctcttgcttgaaaaaatggaaagtgtgaaagatatcgacggtgtgattaatgtatcgttggtgtatcacgagcaagatgaacaaaataaataa

SEQ ID NO: 156835 - protein, 93 aa, Haemophilus influenzae PittEE
MNNTNLISENAGDWHVVGLIVQGNPKKLSAIQTALLAIEHTEIPTFDEKLGKFVVVMQSHDQHLLLEKMESVKDIDGVINVSLVYHEQDEQNK

SEQ ID NO: 156836 - DNA, 264 bp, Actinobacillus succinogenes 130Z
  CDS (1)..(264): transl_table=11
atgagtgatttaaaaacaagtgaaaactggtatgtgtgcagtttagtcgtgcaggctaaaccggtaaaactggaacaagttaaagcggatattttaaacattccgcacgccgagatccacggtgaaaaaccggaagaaggtaaattgatcgtaacactggaaagcgatcagcatttagctttatccgatttaatcaatgaagtcaaaaatgtgaacggagtgattgtcgtctcactgatttcgaattatatcgatgaatcgtaa

SEQ ID NO: 156837 - protein, 87 aa, Actinobacillus succinogenes 130Z
MSDLKTSENWYVCSLVVQAKPVKLEQVKADILNIPHAEIHGEKPEEGKLIVTLESDQHLALSDLINEVKNVNGVIVVSLISNYIDES

SEQ ID NO: 156838 - DNA, 309 bp, Vibrio harveyi ATCC BAA-1116
  CDS (1)..(309): transl_table=11
atgtcactaaacgaagtgcacatttcgagtctggtagtccatgttctgcctgaacatctggctgaagttaaaacccagattgaagcgtacgaaaacgcggagatctacggtgacagtccagaaggcaaaatcgtggtggtgttagaaactgagaaccaaggtttcatcaccgacactatcgatgcgattaataatttaccgaacgtcttgagtacagtactggtttatcaccaaatcgaaactgggcttgaagaaacggaagaaaaagacactggaatacaacattcccaaatcgagggtgaagtatga

SEQ ID NO: 156839 - protein, 102 aa, Vibrio harveyi ATCC BAA-1116
MSLNEVHISSLVVHVLPEHLAEVKTQIEAYENAEIYGDSPEGKIVVVLETENQGFITDTIDAINNLPNVLSTVLVYHQIETGLEETEEKDTGIQHSQIEGEV

SEQ ID NO: 156840 - DNA, 267 bp, Citrobacter koseri ATCC BAA-895
  CDS (1)..(267): transl_table=11
atgcagcacagtaactggcaggtctgtagcctggtcgtccaggccaaaagtcagcacatcaccgacatcagcacgcaattgcaccagtttccgggctgtgaagtcgcgctgagcgatgtcgacagcggtcagttgatcgtggtggtggaagcagaacacagcggaacgctgatgcaaacaattgagtcggtacgcaacgttgcgggcgtgctggcggtgtcgctggtttatcaccagcaggatgagcaaggtgaggaaacaccatga

SEQ ID NO: 156841 - protein, 88 aa, Citrobacter koseri ATCC BAA-895
MQHSNWQVCSLVVQAKSQHITDISTQLHQFPGCEVALSDVDSGQLIVVVEAEHSGTLMQTIESVRNVAGVLAVSLVYHQQDEQGEETP

SEQ ID NO: 156842 - DNA, 255 bp, Shewanella sediminis HAW-EB3
  CDS (1)..(255): transl_table=11
atgagtcaggaataccatgtcaccagcttagtcgtgcatgccgcaccgaaagcggtttctcaggttgaaaccaacattcgagcgcttgtcggtgccgatatacacgccgttaccgatgaaggtaagtttgtcgtcaccctcgaaggtgaaacacaagccgctatactggataacgtcgaagccattaatgccctcgaaggagtgttaaacgccagtctgatttaccatcaagtcgatccaacagaagaaagttaa

SEQ ID NO: 156843 - protein, 84 aa, Shewanella sediminis HAW-EB3
MSQEYHVTSLVVHAAPKAVSQVETNIRALVGADIHAVTDEGKFVVTLEGETQAAILDNVEAINALEGVLNASLIYHQVDPTEES

SEQ ID NO: 156844 - DNA, 267 bp, Serratia proteamaculans 568
  CDS (1)..(267): transl_table=11
atgatgaataacgaatggcacgtcagcgggctggtggtgcaggcacggccggaaaaaattccaaggctggtcgctgacttgctggcgatcgcagacacggaaattccggcccaggaccagcagcacggcaagctggtggtggtgatgcaggcagcttgttcccatcagctgctggaaaaaattgagtcggtacgcaatttggatggcgtgctggcggtatcgctggtttatcaccagcaggacactcaaggtgaggtaacgccatga

SEQ ID NO: 156845 - protein, 88 aa, Serratia proteamaculans 568
MMNNEWHVSGLVVQARPEKIPRLVADLLAIADTEIPAQDQQHGKLVVVMQAACSHQLLEKIESVRNLDGVLAVSLVYHQQDTQGEVTP

SEQ ID NO: 156846 - DNA, 276 bp, Shewanella pealeana ATCC 700345
  CDS (1)..(276): transl_table=11
atgagccaagaatttcatattaccagcctagtcgtgcatgcagcaccccatgctgtgactgagattaagaacagaatatcagttcttgaaggcaccgaaatccatgctgttaccgatgaaggtaaatttgtggtcaccattgaaggtgaaacccaacgtaccatcctcgatagcgtagaagcgattaacgccttagaaggcgtgttaaatagcagtctaatttatcatcaagtcgatccagtagaagaaaagagtgaggaacaccatgagcattag

SEQ ID NO: 156847 - protein, 91 aa, Shewanella pealeana ATCC 700345
MSQEFHITSLVVHAAPHAVTEIKNRISVLEGTEIHAVTDEGKFVVTIEGETQRTILDSVEAINALEGVLNSSLIYHQVDPVEEKSEEHHEH

SEQ ID NO: 156848 - DNA, 258 bp, Shewanella baltica OS195
  CDS (1)..(258): transl_table=11
atgagcaaagaactccatatcaccagtttagtggtgcaggtcttaccgcagaaaatggcagatgttagacaagagatcatgaccattgaaaatgccgaactttccgtcaacaacgaagtgaaattggtcgtggttatcgaaggtgagactcagcgcgccttgatggactgcatagaagcgatcaatgccattccgggtgtgttatccgccactatggtttaccaccagagtgaaacgctcgaagagggtgaagaatga

SEQ ID NO: 156849 - protein, 85 aa, Shewanella baltica OS195
MSKELHITSLVVQVLPQKMADVRQEIMTIENAELSVNNEVKLVVVIEGETQRALMDCIEAINAIPGVLSATMVYHQSETLEEGEE

SEQ ID NO: 156850 - DNA, 276 bp, Shewanella halifaxensis HAW-EB4
  CDS (1)..(276): transl_table=11
atgagccaagaatttcatattaccagcctagtcgtgcatgccgcaccgggtgctgtgactgaaattaagaataaaatatcagctcttgaaggcaccgagatccatgccgttaccgatgaaggcaagtttgtggtcaccattgaaggtgaaacccaacgcgccatcctcgataacgttgaagcgataaacgccctagagggcgtgttaaatagcagtctagtttatcatcaagtcgatccagtagaagaaaagagtgaggaacaccatgagcattag

SEQ ID NO: 156851 - protein, 91 aa, Shewanella halifaxensis HAW-EB4
MSQEFHITSLVVHAAPGAVTEIKNKISALEGTEIHAVTDEGKFVVTIEGETQRAILDNVEAINALEGVLNSSLVYHQVDPVEEKSEEHHEH

SEQ ID NO: 156852 - DNA, 309 bp, Vibrio sp. Ex25
  CDS (1)..(309): transl_table=11
atgtcactaaatgaagtgcatatttcaagtttggtagtacatgtactgccagaacatctggacgaaatcaaacaacagatcgaagcacatgaaaatgcggaaatctatggtgacagtccagaaggcaagattatcgtcgtgcttgaaaccgaaaaccaaggttttatcacagacactatcgatgccattaacaatttaccgaatgtcttgagcacggtattggtttatcaccaaatcgaaactgggcttgaagaaacggatgaagaagacactggaacacaacattcccaaatcgagggtgaagtatga

SEQ ID NO: 156853 - protein, 102 aa, Vibrio sp. Ex25
MSLNEVHISSLVVHVLPEHLDEIKQQIEAHENAEIYGDSPEGKIIVVLETENQGFITDTIDAINNLPNVLSTVLVYHQIETGLEETDEEDTGTQHSQIEGEV

SEQ ID NO: 156854 - DNA, 270 bp, Pectobacterium atrosepticum SCRI1043
  CDS (1)..(270): transl_table=11
atgagcacagtctggcatgtttgcagtgtcgtggttcacgtcaagacggaacgtatggcggcggtgagcgacgtattggaaaaattacccaatgtggaggttgccgccagcgatagcgataccggaaaaatggccgtggtgctggagtcagattcagaagacacgctgttaaaacacatagcgtcaatacgcgagcttgcaggcgtattggcggtttcgctggtttatcaccagcttgatgaacaatctcagggtgaggaaataccatga

SEQ ID NO: 156855 - protein, 89 aa, Pectobacterium atrosepticum SCRI1043
MSTVWHVCSVVVHVKTERMAAVSDVLEKLPNVEVAASDSDTGKMAVVLESDSEDTLLKHIASIRELAGVLAVSLVYHQLDEQSQGEEIP

SEQ ID NO: 156856 - DNA, 264 bp, Salmonella enterica
  subsp. enterica serovar Paratyphi A str. ATCC 9150
  CDS (1)..(264): transl_table=11
atgcacactaactggcaggtctgtagcctggtcgtgcaggccaaaagtcagaacatcgccgccattggcacacaattgaacacgttgccgggttgcgaagtcgcgttaagcgacgttgaaagcgggcaactgatcgtggtggcggaagcagatcagagtgaaacgctgatgcaaacaattgagtcagtacgcaatgttgagggcgtgctggcggtgtcgctggtttatcaccagcaggatgagcaaggtgaggaaacaccatga

SEQ ID NO: 156857 - protein, 87 aa, Salmonella enterica
  subsp. enterica serovar Paratyphi A str. ATCC 9150
MHTNWQVCSLVVQAKSQNIAAIGTQLNTLPGCEVALSDVESGQLIVVAEADQSETLMQTIESVRNVEGVLAVSLVYHQQDEQGEETP

SEQ ID NO: 156858 - DNA, 531 bp, Salmonella enterica
  subsp. enterica serovar Choleraesuis str. SC-B67
  CDS (1)..(531): transl_table=11
atgcctgtgcgcaggcctgtactgaatcgctttttcttccgcgccacaccagggcctgggatctggtttttacgctcacggaaaactgcctcgccaggcaatcggttgaatgccatcgttgccaggacagttgtgaacctatggccattacctttcgtcccacgctatccggcatttaccagccgcagcttgacccgcaggcctgtaacggatgcggggcgtgtgtggctatctgtcccgtgtcagccatcaaagcggagaaccaccatgcgcactaactggcaggtctgtagcctggtcgtgcaggccaaaagtcagaacatcgccgccattggcacacagttgaacacgttgccgggttgcgaagtcgcgttaagcgacgttgaaagcgggcaactgatcgtggtggcggaagcagaccagagtgaaacgctgatgcaaacaattgagtcagtacgcaatgtcgagggcgtactggcggtgtcgctggtttatcaccagcaggatgagcaaggtgaggaaacaccatga

SEQ ID NO: 156859 - protein, 176 aa, Salmonella enterica
  subsp. enterica serovar Choleraesuis str. SC-B67
MPVRRPVLNRFFFRATPGPGIWFLRSRKTASPGNRLNAIVARTVVNLWPLPFVPRYPAFTSRSLTRRPVTDAGRVWLSVPCQPSKRRTTMRTNWQVCSLVVQAKSQNIAAIGTQLNTLPGCEVALSDVESGQLIVVAEADQSETLMQTIESVRNVEGVLAVSLVYHQQDEQGEETP

SEQ ID NO: 156860 - DNA, 264 bp, Shigella dysenteriae Sd197
  CDS (1)..(264): transl_table=11
atgcacactaactggcaagtttgcagcctggtcgtgcaggccaaaagcgaacgaatttcagacatcagcacccaactgaacgcctttcccggctgtgaagttgctgtcagcgacgcgccgagcggtcagttgattgtggtggtggaagcagaagacagcgaaacgctgatccaaaccattgagtcagtacgcaacgtagagggcgtgctggcggtgtcgctggtttatcaccagcaggaagagcaagatgaggaaacaccatga

SEQ ID NO: 156861 - protein, 87 aa, Shigella dysenteriae Sd197
MHTNWQVCSLVVQAKSERISDISTQLNAFPGCEVAVSDAPSGQLIVVVEAEDSETLIQTIESVRNVEGVLAVSLVYHQQEEQDEETP

SEQ ID NO: 156862 - DNA, 264 bp, Shigella flexneri 5 str. 8401
  CDS (1)..(264): transl_table=11
atgcacactaactggcaagtttgcagcctggtcgtgcaggccaaaagcgaacgaacttcagacatcagcacccaactgaacgcctttcccggctgtgaagttgctgtcagcgacgcgccgagcggtcagttgattgtggtggtggaagcagaagacagcgaaacgctgatccaaaccattgagtcagtacgcaacgtagagggcgtgctggcggtgtcgctggtttatcaccagcaggaagagcaaggtgaggaaacaccatga

SEQ ID NO: 156863 - protein, 87 aa, Shigella flexneri 5 str. 8401
MHTNWQVCSLVVQAKSERTSDISTQLNAFPGCEVAVSDAPSGQLIVVVEAEDSETLIQTIESVRNVEGVLAVSLVYHQQEEQGEETP

SEQ ID NO: 156864 - DNA, 270 bp, Shewanella amazonensis SB2B
  CDS (1)..(270): transl_table=11
atgacacaggaatatcacgtcaccagtctggtggtgcatgccgcccccagccaggccaatgtcatcagtgatgccattgacgccctgcccggcgccgaggttcatgccaccagtcccgaaggcaagttggtcgtcaccctggaagggtcaacccagcgagccattctcgacaatgtcgaggccatcaatgcccttaacggggtgctatccagcagtctgatctatcaccaatcagagcaagaacaacaagtgagtgaggaaacaccatga

SEQ ID NO: 156865 - protein, 89 aa, Shewanella amazonensis SB2B
MTQEYHVTSLVVHAAPSQANVISDAIDALPGAEVHATSPEGKLVVTLEGSTQRAILDNVEAINALNGVLSSSLIYHQSEQEQQVSEETP

SEQ ID NO: 156866 - DNA, 282 bp, Haemophilus influenzae R2866
  CDS (1)..(282): transl_table=11
atgaataatacaaatttaatattagaaaatgcgagggattggcacgttgttggattgatcgtgcaaggtaatccaaaaaaattatcagcaattcaaaccgcacttttagcgattgagcatactgaaattccgacttttgatgaaaaacttggaaaatttgtggtggtaatgcaatcgaacgatcagcatctcttgcttgaaaaaatggaaagtgtgaaagatatcgacggtgtgattaatgtatcgttggtgtatcacgagcaagatgaacaaaataaataa

SEQ ID NO: 156867 - protein, 93 aa, Haemophilus influenzae R2866
MNNTNLILENARDWHVVGLIVQGNPKKLSAIQTALLAIEHTEIPTFDEKLGKFVVVMQSNDQHLLLEKMESVKDIDGVINVSLVYHEQDEQNK

SEQ ID NO: 156868 - DNA, 306 bp, Vibrio splendidus 12B01
  CDS (1)..(306): transl_table=11
atggcactaaatgaagtgcatatatcaagtttagtcgtgcatgtgagcccagagcatctagacgagatcaaagcacaaatcgagaaattcgataacgcagagatttacggcagcagccctgaaggcaaaatcatagtagtcctagaaaccgaaaaccaaggttttgtaacggacaccatcgaagaaattaataatattacgaacgttttaggcacagctttggtttatcaccaaatcgaaactgagctcgacgaaacggatttagaaactggaagcaacaattctcaacttgagggtgaagtatga

SEQ ID NO: 156869 - protein, 101 aa, Vibrio splendidus 12B01
MALNEVHISSLVVHVSPEHLDEIKAQIEKFDNAEIYGSSPEGKIIVVLETENQGFVTDTIEEINNITNVLGTALVYHQIETELDETDLETGSNNSQLEGEV

SEQ ID NO: 156870 - DNA, 306 bp, Vibrio sp. MED222
  CDS (1)..(306): transl_table=11
atggcactaaatgaagtgcatatatcaagtttagtcgtgcatgtgagcccagagcatctagacgagatcaaagcacaaatcgagcaatacgataatgcggaaatctacggcagtagccctgaaggcaaaatcatcgtggtcctagaaaccgagaaccaaggttttgttacggacaccatcgaagaaattaataatattacgaacgttttagggacagctttggtttatcaccaaatcgagactggactagacgaaacggatttagaaactggaagcaacaattctcaacttgagggtgaagtatga

SEQ ID NO: 156871 - protein, 101 aa, Vibrio sp. MED222
MALNEVHISSLVVHVSPEHLDEIKAQIEQYDNAEIYGSSPEGKIIVVLETENQGFVTDTIEEINNITNVLGTALVYHQIETGLDETDLETGSNNSQLEGEV

SEQ ID NO: 156872 - DNA, 273 bp, Photobacterium sp. SKA34
  CDS (1)..(273): transl_table=11
atgtctttacaagaagtgcatatatcaagtctcgtggttcatgtaaaacctgagcacttacaagaaataaaagaacagatcttagcaataccaaataccgaaataccgggcgacagtgaagaagggaaaatcattgtagttcttgagacagagaaccaaggctacgtgaccgataccatagataaaatcaataatttagaaaatgtgttaattacttttttggtgtaccaccaaatagagcactttgagacgcaaccagagggcaactcatga

SEQ ID NO: 156873 - protein, 90 aa, Photobacterium sp. SKA34
MSLQEVHISSLVVHVKPEHLQEIKEQILAIPNTEIPGDSEEGKIIVVLETENQGYVTDTIDKINNLENVLITFLVYHQIEHFETQPEGNS

SEQ ID NO: 156874 - DNA, 273 bp, Vibrio angustum S14
  CDS (1)..(273): transl_table=11
atgtctttacaagaagtgcatatatcaagtctcgtggttcatgtaaaacctgagcacttacaagaaataaaagaacagatcttagcaatgccaaataccgaaataccgggcgacagtgaagaagggaaaatcatagtagtacttgagacagagaaccaaggctacgtgaccgataccatagataaaatcaataatttagaaaatgtgttaattacttttttggtgtatcaccaaatagagcactttgagacgcaaccagagggcaactcatga

SEQ ID NO: 156875 - protein, 90 aa, Vibrio angustum S14
MSLQEVHISSLVVHVKPEHLQEIKEQILAMPNTEIPGDSEEGKIIVVLETENQGYVTDTIDKINNLENVLITFLVYHQIEHFETQPEGNS

SEQ ID NO: 156876 - DNA, 309 bp, Vibrio alginolyticus 12G01
  CDS (1)..(309): transl_table=11
atgtcactaaatgaagtgcatatttcaagtttggtagtacatgtgctgccggaacatttggacgaaatcaaacaaaagatagaagcacacgaaaatgcggaaatctatggtgacagtcctgaaggcaagattatcgtcgtacttgaaactgagaaccaaggtttcatcacagacactatcgatgccattaataatttaccgaacgtcttaagcacggtattggtttatcaccaaatcgaaactgggcttgaagaaacggatgaagaagacactggaacacaacattcccaaatcgagggtgaagtatga

SEQ ID NO: 156877 - protein, 102 aa, Vibrio alginolyticus 12G01
MSLNEVHISSLVVHVLPEHLDEIKQKIEAHENAEIYGDSPEGKIIVVLETENQGFITDTIDAINNLPNVLSTVLVYHQIETGLEETDEEDTGTQHSQIEGEV

SEQ ID NO: 156878 - DNA, 285 bp, Labrenzia aggregata IAM 12614
  CDS (1)..(285): transl_table=11
atgaacgcaacagtccacatagccagtcttctcgtccacgcgcgggccgaggcgatatcgcaagtcgagcgcaatttgcttgccatcgacggcgcagagatagcccattccgatgagcagggccgccttatcgtgacgctggaaaccgccaacgaggcggaaatcgtacaggctctcaccgatatccagctgctcaccggcgttgtcagcgcttcccttgtttatcaccagacagacggtgcgcccgaggcagcacccacctcccttcaaggagacataaaatga

SEQ ID NO: 156879 - protein, 94 aa, Labrenzia aggregata IAM 12614
MNATVHIASLLVHARAEAISQVERNLLAIDGAEIAHSDEQGRLIVTLETANEAEIVQALTDIQLLTGVVSASLVYHQTDGAPEAAPTSLQGDIK

SEQ ID NO: 156880 - DNA, 282 bp, Haemophilus influenzae R3021
  CDS (1)..(282): transl_table=11
atgaataatacaaatttaatattagaaaatgcgagggattggcacgttgttggattgatcgtgcaaggtaatccaaaaaaattatcagcaattcaaaccgcacttttagcgattgagcatactgaaattccgacttttgatgaaaaacttgggaaatttgtggtggtaatgcaatcgcacgatcaacatctcttgcttgaaaaaatggaaagtgtgaaagatatcgacggtgtgattaatgtatcgttggtgtatcacgagcaagatgaacaaaataaataa

SEQ ID NO: 156881 - protein, 93 aa, Haemophilus influenzae R3021
MNNTNLILENARDWHVVGLIVQGNPKKLSAIQTALLAIEHTEIPTFDEKLGKFVVVMQSHDQHLLLEKMESVKDIDGVINVSLVYHEQDEQNK

SEQ ID NO: 156882 - DNA, 282 bp, Haemophilus influenzae PittAA
  CDS (1)..(282): transl_table=11
atgaataatacaaatttaatatcagaaaatgcgggagattggcacgttgttggattgatcgtgcaaggtaatccaaaaaaattatcagcaattcaaaccgcacttttagcgattgagcatactgaaattccgacttttgatgaaaaacttgggaaatttgtggtggtaatgcaatcgtacgatcagcatctcttgcttgaaaaaatggaaagtgtgaaagatatcgacggtgtgattaatgtatcgttggtgtatcacgagcaagatgaacaaaataaataa

SEQ ID NO: 156883 - protein, 93 aa, Haemophilus influenzae PittAA
MNNTNLISENAGDWHVVGLIVQGNPKKLSAIQTALLAIEHTEIPTFDEKLGKFVVVMQSYDQHLLLEKMESVKDIDGVINVSLVYHEQDEQNK

SEQ ID NO: 156884 - DNA, 282 bp, Haemophilus influenzae 22.4-21
  CDS (1)..(282): transl_table=11
atgaataatacaaatttaatattagaaaatacgagggattggcacgttgttggattgatcgtgcaaggtaatccaaaaaaattatcagcaattcaaaccgcacttttagcgattgagcatactgaaattccgacttttgatgaaaaacttgggaaatttgtggtggtaatgcaatcgaacgatcagcatctcttgcttgaaaaaatggaaagtgtgaaagatatcgacggtgtgattaatgtatcgttggtgtatcacgagcaagatgaacaaaataaataa

SEQ ID NO: 156885 - protein, 93 aa, Haemophilus influenzae 22.4-21
MNNTNLILENTRDWHVVGLIVQGNPKKLSAIQTALLAIEHTEIPTFDEKLGKFVVVMQSNDQHLLLEKMESVKDIDGVINVSLVYHEQDEQNK

SEQ ID NO: 156886 - DNA, 306 bp, Vibrionales bacterium SWAT-3
  CDS (1)..(306): transl_table=11
atggcactaaatgaagtgcatatatcaagtttagtcgtgcatgtgagcccagagcatctcaatgagatcaaagctgagatcgagcaattcgataacgctgaaatctacggagatagccctgaaggcaaaatcatcgtggtcctagaaaccgagaaccaaggttttgtaacggacaccatcgaagcaataaataacattaagaacgttttagggacagctttggtttaccaccaaatcgaaactggactagacgaaacggatttagaaactggaagcaacaattctcaacttgagggtgaagtatga

SEQ ID NO: 156887 - protein, 101 aa, Vibrionales bacterium SWAT-3
MALNEVHISSLVVHVSPEHLNEIKAEIEQFDNAEIYGDSPEGKIIVVLETENQGFVTDTIEAINNIKNVLGTALVYHQIETGLDETDLETGSNNSQLEGEV

SEQ ID NO: 156888 - DNA, 258 bp, Shewanella baltica OS223
  CDS (1)..(258): transl_table=11
atgagcaaagaactccatatcaccagtttagtggtgcaggtcttaccgcagaaaatggcagacgttagacaagagatcatgaccattgaaaatgccgaactttccgtcaacaacgaagtgaagttggtcgtggtcattgaaggtgagactcagcgcgccttgatggacagcatagaagcgatcaatgccattccgggcgtgttatccgccactatggtttaccaccagagtgaagtgctcgaagagggtgaagaatga

SEQ ID NO: 156889 - protein, 85 aa, Shewanella baltica OS223
MSKELHITSLVVQVLPQKMADVRQEIMTIENAELSVNNEVKLVVVIEGETQRALMDSIEAINAIPGVLSATMVYHQSEVLEEGEE

SEQ ID NO: 156890 - DNA, 309 bp, Vibrio harveyi HY01
  CDS (1)..(309): transl_table=11
atgtcactaaacgaagtgcacatttcgagtctggtagtccatgttctgcctgaacatctggctgaagtgaaaacccagattgaagcgtacgaaaacgcagagatctacggtgacagtccagaaggcaaaatcgtggtggtgctagaaactgagaaccaaggtttcatcaccgacactatcgatgcgattaataatttaccgaatgtcttgagcacagtactggtttatcaccaaatcgaaactgggcttgaagaaacggaagaaaaagacactggaacacaacattcccaaatcgagggtgaagtatga

SEQ ID NO: 156891 - protein, 102 aa, Vibrio harveyi HY01
MSLNEVHISSLVVHVLPEHLAEVKTQIEAYENAEIYGDSPEGKIVVVLETENQGFITDTIDAINNLPNVLSTVLVYHQIETGLEETEEKDTGTQHSQIEGEV

SEQ ID NO: 156892 - DNA, 285 bp, Haemophilus parasuis 29755
  CDS (1)..(285): transl_table=11
atgagaaatgtatctgataaattgaactacgatgaagcggacaactggtatgtttgtagccttgtagttcaagtgaaacctgaaaagttggacttggtgaagcaagccttaactgagttaccgaatacggaaatccacggggtgaaacttgaagagagtaagctcgtggttgttttggagtccagttatcaacctgatttggttgatcgtatggagatgattaaagatattgaaggggttatcgtggtgtcgctgatttatagccaccaagatgaaacactttaa

SEQ ID NO: 156893 - protein, 94 aa, Haemophilus parasuis 29755
MRNVSDKLNYDEADNWYVCSLVVQVKPEKLDLVKQALTELPNTEIHGVKLEESKLVVVLESSYQPDLVDRMEMIKDIEGVIVVSLIYSHQDETL

SEQ ID NO: 156894 - DNA, 264 bp, Escherichia albertii TW07627
  CDS (1)..(264): transl_table=11
atgcacactaactggcaagtttgcagcctggtggtccaggcaaaaagcgagcgaattccagatatcagcagccaactgaacgcctttcccggctgtgaagtcgccgtcagcgacgtgccgagcggtcagttgattgtggtagcggaagccgaagacagcgaaacgctaattcaaactattgagtcagtacgcaatgtagagggcgtgctggcggtgtcgctggtttatcaccagcaggaagagcaaggtgaggaaacaccatga

SEQ ID NO: 156895 - protein, 87 aa, Escherichia albertii TW07627
MHTNWQVCSLVVQAKSERIPDISSQLNAFPGCEVAVSDVPSGQLIVVAEAEDSETLIQTIESVRNVEGVLAVSLVYHQQEEQGEETP

SEQ ID NO: 156896 - DNA, 378 bp, Providencia stuartii ATCC 25827
  CDS (1)..(378): transl_table=11
atggaatttatcagcccaatattgataagcaaggttgtacaggttgtggtgcctgtgttgccggttgccccgtatcagccattactttggagcatgaaaatgcgcaatagctggcaagtatgtagtttgattgtacaagtaaaaagtgaacaggcttgcgctgtgacggcagctttaaatcaattacccggttgtgaggtggctatcagttcaccggaaacaggcaaattgattgttgttgtcgagtcagaacacagtcgcaccctgattgagactattgattcagtacgcaatgttaatggtgtgctggctgtttcgctggtttaccaccagcaggatgagcaatgtgaggaaaatgatgaaactcagtcgtcgtag

SEQ ID NO: 156897 - protein, 125 aa, Providencia stuartii ATCC 25827
MEFISPILISKVVQVVVPVLPVAPYQPLLWSMKMRNSWQVCSLIVQVKSEQACAVTAALNQLPGCEVAISSPETGKLIVVVESEHSRTLIETIDSVRNVNGVLAVSLVYHQQDEQCEENDETQSS

SEQ ID NO: 156898 - DNA, 309 bp, Magnetospirillum gryphiswaldense
  CDS (1)..(309): transl_table=11
atgcgcttaggcacttttgtcgcacgggagcacgaagccccccgcgtatcggtggaaaacatctgcggcgtgctggttcacgtggtgccgcgcgaccgcaaccgcatcaaggcggcgctggaagcgctgcccggcgtcgaggtgcacaccatgaccgacgacggcaggctggttgtcatcgtcgaggatgccgaaggcctttgggccggggccaccatcaccagtttccatgacatcgagggcgtcctgtcggtcgcccttgtctatcaccatttcgaccaggatttggaaggggagatcgttccatga

SEQ ID NO: 156899 - protein, 102 aa, Magnetospirillum gryphiswaldense
MRLGTFVAREHEAPRVSVENICGVLVHVVPRDRNRIKAALEALPGVEVHTMTDDGRLVVIVEDAEGLWAGATITSFHDIEGVLSVALVYHHFDQDLEGEIVP

SEQ ID NO: 156900 - DNA, 270 bp, Providencia rustigianii DSM 4541
  CDS (1)..(270): transl_table=11
atgaagatgcacaataattggcaagtttgcagcttgattgttcaagtaaaaagtgaacgaatccccgctgtaactaaagaattaaatcaatttcctaactgcgaagtcgctatttcctctccagaaaatggcaaattaattgtggtcgtggaaggggaagatagcaaaacgttattagataccattgatttagcacgtaatatcgatggtgtattggatgtttcactggtttatcaccagcaggatgagcaatgtgaggaaaaagtatga

SEQ ID NO: 156901 - protein, 89 aa, Providencia rustigianii DSM 4541
MKMHNNWQVCSLIVQVKSERIPAVTKELNQFPNCEVAISSPENGKLIVVVEGEDSKTLLDTIDLARNIDGVLDVSLVYHQQDEQCEEKV

SEQ ID NO: 156902 - DNA, 270 bp, Providencia alcalifaciens DSM 30120
  CDS (1)..(270): transl_table=11
atgaagatgcacaataactggcaagtttgcagtttgattgttcaagtcaaaagtgaacgcattccagctgtgacagatgaattacaccaagaacccaactgcgaagtggctatttcctcgcctgaaaatggcaagttaattgtggttgtagaaggggaagacagcaaaacgcttttagatactatcgattttatccgtgatatcgatggtgtattggatgtttcactggtttatcaccagcaggatgagcaatgtgaggaaaaagtatga

SEQ ID NO: 156903 - protein, 89 aa, Providencia alcalifaciens DSM 30120
MKMHNNWQVCSLIVQVKSERIPAVTDELHQEPNCEVAISSPENGKLIVVVEGEDSKTLLDTIDFIRDIDGVLDVSLVYHQQDEQCEEKV

SEQ ID NO: 156904 - DNA, 333 bp, Bradyrhizobium japonicum
  CDS (1)..(333): transl_table=11
atggcccaaccctcactcaatcataaagtcacgctcaaccgccgcgccttgatcaccggccgggtgctcagcgccgaccgtatcgtgccgccgccgggctacgaaatcgccagcatcatcgtgcaggcgcgccccgagcgcctcgccgaggtcgaagccgagatcattgcgcttgccggctgcgagatccacggccgcgacccgcgcggcaagctcgtcgtcgtgaccgaagcgccggatgccggcagcctcggcaccatgctcaacaccatccagtcgctgcaacacgtctattccgcggcgctggtcttccacgccatcgaaaccgcctga

SEQ ID NO: 156905 - protein, 110 aa, Bradyrhizobium japonicum
MAQPSLNHKVTLNRRALITGRVLSADRIVPPPGYEIASIIVQARPERLAEVEAEIIALAGCEIHGRDPRGKLVVVTEAPDAGSLGTMLNTIQSLQHVYSAALVFHAIETA

SEQ ID NO: 156906 - DNA, 20 bp, Artificial sequence
  primer
atgcacactaactggcaagt

SEQ ID NO: 156907 - DNA, 25 bp, Artificial sequence
  primer
ttatggtgtttcctcaccttgctct

SEQ ID NO: 156908 - protein, 68 aa, Artificial sequence
  consensus sequence
  Variant (2)..(2): Xaa in position 2 is any amino acid
  Variant (4)..(23): Xaa in position 4 to 23 is any amino acid
  Variant (25)..(30): Xaa in position 25 to 30 is any amino acid
  Variant (31)..(32): Xaa in position 31 to 32 is any or no amino acid
  Variant (34)..(36): Xaa in position 34 to 36 is any amino acid
  Variant (39)..(59): Xaa in position 39 to 59 is any amino acid
  Variant (61)..(64): Xaa in position 61 to 64 is any amino acid
LXVXXXXXXXXXXXXXXXXXXXXEXXXXXXXXGXXXVVXXXXXXXXXXXXXXXXXXXXXVXXXXLVYH

SEQ ID NO: 156909 - protein, 34 aa, Artificial sequence
  protein pattern
  Variant (2)..(2): Xaa in position 2 is Thr or Val
  Variant (3)..(3): Xaa in position 3 is any amino acid
  Variant (4)..(4): Xaa in position 4 is Glu or Gln
  Variant (5)..(5): Xaa in position 5 is Ala, Gly, Ser or Thr
  Variant (6)..(7): Xaa in position 6 to 7 is any amino acid
  Variant (8)..(8): Xaa in position 8 is Glu, Gln or Ser
  Variant (9)..(10): Xaa in position 9 to 10 is any amino acid
  Variant (11)..(11): Xaa in position 11 is Ile, Leu or Val
  Variant (12)..(12): Xaa in position 12 is any amino acid
  Variant (13)..(13): Xaa in position 13 is Asp, Glu, Asn or Gln
  Variant (14)..(14): Xaa in position 14 is any amino acid
  Variant (15)..(15): Xaa in position 15 is Ile, Leu, Met or Val
  Variant (16)..(16): Xaa in position 16 is Asp, Glu or Thr
  Variant (17)..(20): Xaa in position 17 to 20 is any amino acid
  Variant (21)..(21): Xaa in position 21 is Ile, Leu or Val
  Variant (22)..(22): Xaa in position 22 is any amino acid
  Variant (23)..(23): Xaa in position 23 is Gly or Asn
  Variant (25)..(25): Xaa in position 25 is Ile, Leu or Val
  Variant (26)..(26): Xaa in position 26 is any amino acid
  Variant (27)..(27): Xaa in position 27 is Ala, Ser, Thr or Val
  Variant (28)..(28): Xaa in position 28 is any amino acid
  Variant (29)..(29): Xaa in position 29 is Leu or Met
  Variant (33)..(33): Xaa in position 33 is any or no amino acid
VXXXXXXXXXXXXXXXXXXXXXXVXXXXXVYHXQ

SEQ ID NO: 156910 - DNA, 1335 bp, ESCHERICHIA COLI
  CDS (1)..(1335): transl_table=11
atgagccataaacctgcgcatttattattggtcgatgacgatccgggattgctgaaactgcttggcctgcgcctgaccagcgaaggctacagtgtggtcacggcggaaagtggcgctgaaggattacgggtactgaatcgcgaaaaagtagatttagtcatcagcgacctgcggatggatgaaatggacggtatgcagctgtttgctgaaatccagaaagtgcagccgggaatgccggtaattattcttaccgcgcatggttctattcccgatgccgttgctgcaacacagcagggcgtttttagtttcctcaccaagcctgtcgacaaagacgcgctatatcaggcaattgacgatgcgctggagcaatccgcgccagccaccgatgaacgctggcgcgaggcaattgtcacccgcagcccgctgatgctgcgtttgctggaacaggcgcggctggtggcgcaatcagacgtcagcgttttgattaacggtcagagcggcaccgggaaagagattttcgcccaggctatccacaacgccagcccgcgcaacagcaaaccatttattgctattaactgtggcgcattgcccgagcaattgctggagtcggagctgtttggtcatgcgcgtggcgcgtttactggcgctgtcagcaatcgcgaaggtttattccaggcggcggaaggcggaacgctatttctcgatgaaattggcgatatgcctgcgccgttacaggtcaaactgctgcgcgtgttgcaggagcgtaaagtgcgcccgctgggcagtaaccgcgatattgatatcaatgtgcggattatttctgccactcaccgtgatctgccaaaagcgatggcgcgcggggaattccgcgaagatctctattaccgcctcaacgttgtcagcctgaaaattccggcactggcggagcgcacagaagacattccgctactggcaaatcacctgttgcgccaggcggcagagcgacataaaccgtttgtccgcgcgttctctaccgatgcgatgaaacgcctgatgaccgcgagctggccgggtaatgtgcgccagttggtcaacgtgattgaacagtgcgtggcgctgacctcatctccggtgattagtgatgcgctggtggagcaggcgctggagggtgaaaatacggcgctgccaacctttgttgaggcacgtaatcagtttgaactcaactatttgcgtaagctgctgcaaatcaccaaaggcaacgtcacccacgcggcgagaatggcggggcgcaaccggacagaattttataaactgctttcccgacacgagctggatgcaaacgatttcaaggaataa

SEQ ID NO: 156911 - protein, 444 aa, ESCHERICHIA COLI
MSHKPAHLLLVDDDPGLLKLLGLRLTSEGYSVVTAESGAEGLRVLNREKVDLVISDLRMDEMDGMQLFAEIQKVQPGMPVIILTAHGSIPDAVAATQQGVFSFLTKPVDKDALYQAIDDALEQSAPATDERWREAIVTRSPLMLRLLEQARLVAQSDVSVLINGQSGTGKEIFAQAIHNASPRNSKPFIAINCGALPEQLLESELFGHARGAFTGAVSNREGLFQAAEGGTLFLDEIGDMPAPLQVKLLRVLQERKVRPLGSNRDIDINVRIISATHRDLPKAMARGEFREDLYYRLNVVSLKIPALAERTEDIPLLANHLLRQAAERHKPFVRAFSTDAMKRLMTASWPGNVRQLVNVIEQCVALTSSPVISDALVEQALEGENTALPTFVEARNQFELNYLRKLLQITKGNVTHAARMAGRNRTEFYKLLSRHELDANDFKE

SEQ ID NO: 156912 - DNA, 1383 bp, Mesorhizobium loti MAFF303099
  CDS (1)..(1383): transl_table=11
atgaacgagggatcacggagggtggcgctcgtcgaggacgatgccgacctgctgcacgccaccacgcaattgctcgagctcgccggtttcaccgtggttgcgcgcgaggccgccgaggccgcatttgccgtcgtcgacagagacttcgacggcgtggttgtcaccgacatccgcatgccgggcatgaacggcttgcagctgttcgatcgcattaaggcgatcgacccggacataccggtgatcctggtcaccgggcatggcgatgtcgatctggctgtcgccgcgctcaaggacggtgtctacgacttcatcccaaaaccctatgccggagaccgccttgtcgaggcgctgaaacgggcatcggagaagcggcggctggtgatggagaaccggcggctgcgcgaagccgccgcactagctgccgacggcctgccgctgatcggcgaggcgccggccatccggcggctgcgcgaaaccttgcgccagatcgccgacatggatgtcgacgtgctggtggaaggcgagacgggaaccggcaaggaagtggtggccgacctcctgcaccgttggggccggcggcattccaaacccttcgtggcgctgaattgcggtgccttgccggaaaccgtcattgaaagcgagctgttcggccacgaggccggcgcgtttaccggcgcgcagcggcggcggatcggccgcgtcgaacattccagcggcggcacgctgttcctcgacgagatcgaatccatgccgccggccctgcaggtcaagctgctgcgggtgctggagacgcgcagcctcacgccgcttggctcgaacgagatccggcgcctcgatctgagggtcgtggcggcgactaaggtcgatctcggccggcccgatcagcgcggcgatttccgtgaggacctctatttccgcctcaacgtggtgacgctacggattccgcccctgcgcgagcggcgcggcgacattccgatgctgttcggccatttcctcggtaaggccgccgagcggttcggccggcctgtcgccaaggtgaatgccgcggtgagcgatcatctccagtcgcatgcctggccgggcaatgtccgcgagctcgcccatttcgccgatcgcgtcacgctcggtcttgggcctgacgacgagacgaaagcggttcccccgcaatcggagcctcccgcctcgctgccggaacgcgtgggccattacgaggcgcagctcattcgtgaggcgctgcgcgaccatggcggcgatgtgcgcagcgccatcgacgcgctcggcgtgccgcgcaagactttttacgacaagctcaagcgctacggcattgccgcatccgaattccgcaacggcggcgatccgcaccctgttcgagagcagacatag

SEQ ID NO: 156913 - protein, 460 aa, Mesorhizobium loti MAFF303099
MNEGSRRVALVEDDADLLHATTQLLELAGFTVVAREAAEAAFAVVDRDFDGVVVTDIRMPGMNGLQLFDRIKAIDPDIPVILVTGHGDVDLAVAALKDGVYDFIPKPYAGDRLVEALKRASEKRRLVMENRRLREAAALAADGLPLIGEAPAIRRLRETLRQIADMDVDVLVEGETGTGKEVVADLLHRWGRRHSKPFVALNCGALPETVIESELFGHEAGAFTGAQRRRIGRVEHSSGGTLFLDEIESMPPALQVKLLRVLETRSLTPLGSNEIRRLDLRVVAATKVDLGRPDQRGDFREDLYFRLNVVTLRIPPLRERRGDIPMLFGHFLGKAAERFGRPVAKVNAAVSDHLQSHAWPGNVRELAHFADRVTLGLGPDDETKAVPPQSEPPASLPERVGHYEAQLIREALRDHGGDVRSAIDALGVPRKTFYDKLKRYGIAASEFRNGGDPHPVREQT

SEQ ID NO: 156914 - DNA, 1338 bp, Yersinia pestis CO92
  CDS (1)..(1338): transl_table=11
atgacaccacgcaaaccggccaatctactgctggttgacgacgatcccagcttattgaaattgctggggatgcgtttaaccagtgaagggtttaatgtcacgacagctgaaagcggtcacgaagcattgcgtttgttaatgcgtgagaaaattgacattgttatcagtgatctgcgaatggatgagatggacggcatggcgctgttcgctgaaattcaaaaatatcaaccggggatgcctgtgattatcctcacagcgcacggttcgatccctgatgccgttgccgcgacccagcaaggggtattcagttttctgaccaagcctgttgatcgcgatgcgctatataaggctattgatgcggcattagaactttcgattccagcgggtgatgatacttggcgtgaagagatagtgactcgcagcccggtcatgctacgtctgttagaacaagcgaaaatggtcgcacaatctgacgtcagtgtgctgattaacgggcaaagcggcaccggtaaagaggtattggcacaggctatccatgccgccagcccacgggccaaaaaagcctttattgccatcaactgtggtgccttaccagagcagttgctggagtctgaattattcggccatgctaagggtgcgtttaccggtgcagtcagcagccgtgaagggttgtttcaggccgctgaagggggcacattgttcctggatgagatcggcgatatgccgctctcattacaagtaaaattactgcgggtattgcaagagcgcaaagttcgtccattgggcagcaatcgtgatttaagtattaatgtccgggtgatttcagcgactcaccgtgacttgcccaaagcgatggcaaagaatgaattccgtgaagatctctactaccgtttaaatgtggttaacctaaaaatcccggcgctacacgagcgggcggaagatattccattgctggcaaaccatctattacgggagtcggctaagcggcataagccgtttgttcgcagtttctcaaacgatgcgatgaagcggttgatgacagccagttggcccggtaacgtgcgccaactggtcaacgtgattgagcaatgcgtggcgttgacctcggcaccggttatcagcgaagcgctggttgagcaggcgctggagggtgaaaataccgtattaccgacgtttgtggaggcccgtaatcaattcgaactaaactatttgcgtaagctattacaaattgccaaaggtaacgttacccaagccgctcgtatggcggggcgtaaccgtactgagttctataaattgttgtctcgccacgagttggatgccaacgattttaaagagtaa

SEQ ID NO: 156915 - protein, 445 aa, Yersinia pestis CO92
MTPRKPANLLLVDDDPSLLKLLGMRLTSEGFNVTTAESGHEALRLLMREKIDIVISDLRMDEMDGMALFAEIQKYQPGMPVIILTAHGSIPDAVAATQQGVFSFLTKPVDRDALYKAIDAALELSIPAGDDTWREEIVTRSPVMLRLLEQAKMVAQSDVSVLINGQSGTGKEVLAQAIHAASPRAKKAFIAINCGALPEQLLESELFGHAKGAFTGAVSSREGLFQAAEGGTLFLDEIGDMPLSLQVKLLRVLQERKVRPLGSNRDLSINVRVISATHRDLPKAMAKNEFREDLYYRLNVVNLKIPALHERAEDIPLLANHLLRESAKRHKPFVRSFSNDAMKRLMTASWPGNVRQLVNVIEQCVALTSAPVISEALVEQALEGENTVLPTFVEARNQFELNYLRKLLQIAKGNVTQAARMAGRNRTEFYKLLSRHELDANDFKE

SEQ ID NO: 156916 - DNA, 1326 bp, Escherichia coli str. K-12 substr. MG1655
  CDS (1)..(1326): transl_table=11
atgacgcacgataatatcgatattctggtggtggatgatgacattagccactgcactattttgcaggctttactgcgcggctggggctataacgtcgcgctggcgaacagcgggcgacaggcgttggagcaggtgcgggaacaggtttttgatcttgtgctttgcgatgtgcgaatggcggagatggacggcatcgccacgctgaaagagatcaaagcgttaaacccggcaattccggtgctgattatgactgcgtactccagcgtcgagacggcggtagaggcactgaaaactggggcgctggattatctcatcaagccgctggatttcgataacctacaggcgacgctggaaaaagcgctcgcgcatacgcacagtattgatgctgaaacacctgcggtgactgccagccagttcggtatggtcggtaaaagcccggcgatgcaacacctgctcagtgaaatcgccctcgtcgcgccatcggaagccacggtactgatccacggcgattccggcaccggtaaagagctggtcgccagggcgattcacgccagtagcgcacgtagcgaaaaaccgctggtaacgctcaactgtgcggcactcaacgaatccttgctggaatctgaattgttcggtcacgaaaaaggggcgtttactggagccgataaacgccgggaagggcgctttgttgaggcggacggcggcacgctgtttctcgatgaaattggcgatatctcgccgatgatgcaggtgcgtctgctgcgtgcgattcaggagcgcgaagttcagcgtgtcggtagcaaccagattatctcggttgatgtccggctgattgcggcgacccatcgcgatcttgccgcagaggtgaatgccgggcgttttcgccaggatctctactatcgcctgaatgtggtggcgattgaagtaccatcgctgcggcaacggcgggaagatatccctctgctggctggccattttctgcagcgctttgccgagcgtaatcgcaaggcggtaaaaggttttacgccccaggcgatggatctgttgattcattacgactggccgggaaatattcgtgagctggaaaacgcggtggaacgggcagtggtgctgctgaccggggaatatatttccgaacgcgagctgccgctggcgattgccagtacgccgatcccgctgggacaaagtcaggatattcagccgttggtggaagtggaaaaagaggtgattctggcggcgctggagaaaacgggcggcaacaaaaccgaagccgcccgtcagttagggatcacgcgcaaaacgctattggcaaaactgtcgcgttag

SEQ ID NO: 156917 - protein, 441 aa, Escherichia coli str. K-12 substr. MG1655
MTHDNIDILVVDDDISHCTILQALLRGWGYNVALANSGRQALEQVREQVFDLVLCDVRMAEMDGIATLKEIKALNPAIPVLIMTAYSSVETAVEALKTGALDYLIKPLDFDNLQATLEKALAHTHSIDAETPAVTASQFGMVGKSPAMQHLLSEIALVAPSEATVLIHGDSGTGKELVARAIHASSARSEKPLVTLNCAALNESLLESELFGHEKGAFTGADKRREGRFVEADGGTLFLDEIGDISPMMQVRLLRAIQEREVQRVGSNQIISVDVRLIAATHRDLAAEVNAGRFRQDLYYRLNVVAIEVPSLRQRREDIPLLAGHFLQRFAERNRKAVKGFTPQAMDLLIHYDWPGNIRELENAVERAVVLLTGEYISERELPLAIASTPIPLGQSQDIQPLVEVEKEVILAALEKTGGNKTEAARQLGITRKTLLAKLSR

SEQ ID NO: 156918 - DNA, 1383 bp, Sinorhizobium meliloti 1021
  CDS (1)..(1383): transl_table=11
atgagcgccgccccatccgtgttcctgatcgatgacgaccgcgacttgcgcaaggcaatgcagcagacgctcgagcttgcgggcttcaccgtctcgtccttcgccagcgcgaccgaagcgctcgccggactttccgccgacttcgcgggcatcgtcatcagcgatatccgcatgcccggcatggacgggcttgcccttttccgcaagatcctggcgctcgatccggacctgccgatgatccttgttacggggcacggcgacataccgatggcggtgcaggcgatccaggacggcgcctatgacttcatcgccaagccgtttgccgccgatcgtcttgtccagagcgcccggcgcgcagaggagaagcggcggctcgtgatggagaaccggtcgctgcgccgcgcggccgaagccgcctccgaaggcctgccgctgatcggccagacgccggtcatggagcggcttcgccagaccttgaaacacatcgccgacaccgatgtcgacgtgttggttgccggcgagacgggcagcggcaaggaggtcgtcgccacgctgctgcaccaatggagccgccgcaggaccggcaatttcgtcgcgctgaattgcggcgctctgccggaaacggtgatcgaaagcgagctcttcggccacgagcccggcgcctttaccggcgccgtcaagaagcggatcggccggatcgagcatgcgagcggcggcacgctcttcctcgacgagatcgaggccatgccgccggcaactcaggtgaagatgctgcgcgtgctggaagcccgcgagatcacgccgctcggcaccaatctgacccgccccgtcgacatccgcgtcgtcgccgcagccaaggtcgatctcggcgacccggccgcgcgcggcgatttccgcgaggatctctattaccggctgaacgtcgtgacgctctcgatcccgcccctgcgcgaacggcgcgacgacatccccctcctcttctcccatttcctggcccgcgcctcggaacgcttcggccgcgaagtgcccgcgatctcggctgccatgcgcgcgtacctggcgacgcattcctggcccggcaatgtgcgcgagctttcgcacttcgccgaacgggtggcgctgggggtggagggaaacctgggagttccggccgcagcgcccgcctcaagcggagcgaccctgccggaaagattggaacgctacgaggccgatatcctcaagcaggcgctcacggcgcattgcggcgacgtcaaagagaccctgcaagccctcggcatcccccgcaagactttttacgacaagctgcagcgccatgggatcaaccgggcagattatgtcgaacgggcaggcccggggcgtcccaatgccatatcgaaaacttga

SEQ ID NO: 156919 - protein, 460 aa, Sinorhizobium meliloti 1021
MSAAPSVFLIDDDRDLRKAMQQTLELAGFTVSSFASATEALAGLSADFAGIVISDIRMPGMDGLALFRKILALDPDLPMILVTGHGDIPMAVQAIQDGAYDFIAKPFAADRLVQSARRAEEKRRLVMENRSLRRAAEAASEGLPLIGQTPVMERLRQTLKHIADTDVDVLVAGETGSGKEVVATLLHQWSRRRTGNFVALNCGALPETVIESELFGHEPGAFTGAVKKRIGRIEHASGGTLFLDEIEAMPPATQVKMLRVLEAREITPLGTNLTRPVDIRVVAAAKVDLGDPAARGDFREDLYYRLNVVTLSIPPLRERRDDIPLLFSHFLARASERFGREVPAISAAMRAYLATHSWPGNVRELSHFAERVALGVEGNLGVPAAAPASSGATLPERLERYEADILKQALTAHCGDVKETLQALGIPRKTFYDKLQRHGINRADYVERAGPGRPNAISKT

SEQ ID NO: 156920 - DNA, 1338 bp, Salmonella enterica subsp. enterica serovar Typhi str. CT18
  CDS (1)..(1338): transl_table=11
atgataagccgtaaaccggcgcacctgctgctggtcgatgacgatcccggattactgaaattgctcggtatgcgcctgaccagtgaaggatacagcgtcgtgaccgcagagagcggccaggaaggactacgggtactgcatcgggaaaaagtggatctggtaataagcgacctgcgcatggacgaaatggatggtatgcaactgttcacagaaattcagaaagtacagccgggaatgccggttattattctgacggcgcatggttctattccggatgcggtggccgctacccagaagggcgtattcagctttttgacgaagccgatcgacagagacgcgttatataaagcgatagatgaagcgctggagcagtccgctcccgcgacggacgatagctggcgcaacgctatcgttacccgtagcccgctgatgctgcgactgcttgaacaggcgcgcatggtcgcgcagtcggatgtcagcgtattgattaacggacaaagcggcaccgggaaagagattttcgcacaggcgattcataatgccagcccgcgcaataacaagccgtttgtcgccatcaactgcggcgcgttaccggaacagttgctggagtccgaattattcggccatgcgcgcggcgcctttaccggcgcagtgagcaatcgtgaagggttgttccaggcggcggaaggcggcacgctgtttctggatgaaattggcgatatgcccgcgccgttacaggtgaagctgctgcgggtgttacaggagcgcaaagtcaggccgctgggcagcaatcgcgatattgatatcgacgtgcgaattatttccgcgacgcaccgcgatctgccgaaggcgatggcgcggggcgaatttcgtgaagatttgtactaccggctgaatgtcgtgagcctgaaaattccggcgctggcggagcgtaccgaggatattccgctgctggctaatcatctgctcagacagtcggcacagcggcataaaccgtttgttcgcgccttttctactgatgcaatgaaacggctgatgacggcaagctggccgggcaacgtgcgccaactggtcaacgtcattgaacaatgtgtggcgttaacctcttcgccggtgatcagcgatgcattggtcgagcaggcgctggaaggcgaaaacaccgcgctgccaacttttgccgaagcgcgaaaccaatttgaactgaactatctgcgcaagttactgcaaattaccaaaggtaacgtgacgcacgcggcaaggatggcggggcgcaaccgcacggaattctataagctactctcccgtcacgaactggatgcgaatgatttcaaagagtag

SEQ ID NO: 156921 - protein, 445 aa, Salmonella enterica subsp. enterica serovar Typhi str. CT18
MISRKPAHLLLVDDDPGLLKLLGMRLTSEGYSVVTAESGQEGLRVLHREKVDLVISDLRMDEMDGMQLFTEIQKVQPGMPVIILTAHGSIPDAVAATQKGVFSFLTKPIDRDALYKAIDEALEQSAPATDDSWRNAIVTRSPLMLRLLEQARMVAQSDVSVLINGQSGTGKEIFAQAIHNASPRNNKPFVAINCGALPEQLLESELFGHARGAFTGAVSNREGLFQAAEGGTLFLDEIGDMPAPLQVKLLRVLQERKVRPLGSNRDIDIDVRIISATHRDLPKAMARGEFREDLYYRLNVVSLKIPALAERTEDIPLLANHLLRQSAQRHKPFVRAFSTDAMKRLMTASWPGNVRQLVNVIEQCVALTSSPVISDALVEQALEGENTALPTFAEARNQFELNYLRKLLQITKGNVTHAARMAGRNRTEFYKLLSRHELDANDFKE

SEQ ID NO: 156922 - DNA, 1338 bp, Salmonella enterica subsp. enterica serovar Typhimurium str. LT2
  CDS (1)..(1338): transl_table=11
atgataagccgtaaaccggcgcacctgctgctggtcgatgacgatcccggattactgaaattgctcggtatgcgcctgaccagtgaaggatacagcgtcgtgaccgcagagagcggccaggaaggactacgggtactacatcgggaaaaagtggatctggtaataagcgacctgcgcatggacgaaatggatggtatgcaactgttcacagaaattcagaaagtacagccgggaatgccggttatcattctgacggcgcatggttctattccggatgcggtggccgctacccagaaaggcgtattcagctttttgacgaagccgatcgacagagacgcgttatataaagcgatagatgaagcgctggagcagtccgctcccgcgacggacgatagctggcgcaacgctatcgttacccgtagcccgctgatgctgcgactgcttgaacaggcgcgcatggtcgcgcagtcggatgtcagcgtattgattaacggacaaagcggcaccgggaaagagattttcgcacaggcgattcataatgccagcccgcgcagtaacaagccgtttgtcgccattaactgcggcgcgttaccggaacagttgctggagtccgaattattcggccatgcgcgcggcgcctttaccggcgcagtgagcaatcgtgaagggttgttccaggcggcggaaggcggcacgctgtttctggatgaaattggcgatatgcccgcgccgttacaggtgaagctgctgcgggtgttacaggagcgcaaagtcaggccgctgggcagcaatcgcgatattgatatcgacgtgcgaattatttccgcgacgcaccgcgatctgccgaaggcgatggcgcggggcgaatttcgtgaagatttgtactaccggctgaatgtcgtgagcctgaaaattccggcgctggcggagcgtaccgaggatattccgctgctggctaatcatctgctcagacagtcggcacagcggcataaaccgtttgttcgcgccttttctactgatgcaatgaaacggctgatgacggcaagctggccgggcaacgtgcgccaactggtcaacgtcattgaacaatgcgtggcgttaacttcttcgccggtgatcagcgatgcgttggtcgagcaggcgctggaaggcgaaaacaccgcgctgccaacttttgccgaagcgcgaaaccaatttgaactgaactatctgcgcaagttactgcaaattaccaaaggtaacgtgacgcacgcggcaaggatggcggggcgcaaccgcacggaattctataagctactctcccgtcacgaactggatgcgaatgatttcaaagagtag

SEQ ID NO: 156923 - protein, 445 aa, Salmonella enterica subsp. enterica serovar Typhimurium str. LT2
MISRKPAHLLLVDDDPGLLKLLGMRLTSEGYSVVTAESGQEGLRVLHREKVDLVISDLRMDEMDGMQLFTEIQKVQPGMPVIILTAHGSIPDAVAATQKGVFSFLTKPIDRDALYKAIDEALEQSAPATDDSWRNAIVTRSPLMLRLLEQARMVAQSDVSVLINGQSGTGKEIFAQAIHNASPRSNKPFVAINCGALPEQLLESELFGHARGAFTGAVSNREGLFQAAEGGTLFLDEIGDMPAPLQVKLLRVLQERKVRPLGSNRDIDIDVRIISATHRDLPKAMARGEFREDLYYRLNVVSLKIPALAERTEDIPLLANHLLRQSAQRHKPFVRAFSTDAMKRLMTASWPGNVRQLVNVIEQCVALTSSPVISDALVEQALEGENTALPTFAEARNQFELNYLRKLLQITKGNVTHAARMAGRNRTEFYKLLSRHELDANDFKE

SEQ ID NO: 156924 - DNA, 1347 bp, Xanthomonas axonopodis pv. citri str. 306
  CDS (1)..(1347): transl_table=11
atggcgcgcatcctgatcatcgatgacgatgccgcgtttcgcaccaccttgcaggccaccttgcgctcgctcgggcatacggcggtcgccgccgagaatgggccggacgggctggcccggttgagcgaaggcggcatcgacatggcgtttgtggatttccgcatgccgggcatggatggcatcgcggtgctgcgcgcgcgcctggacgatgcgcaggcgcgtcaggtgccgctggtgatgctgaccgcccatgtgtccagcggcaacacgatcgaggcgatgacgctgggcgccttcgatcatctggtcaagccggttggtcgtgccgacatcgtggaggtggtggagcgcgcactgctcagtcgcgccgaggcgcaggctgcagcgacagacgcgttgtctgcgccggtcgaggacgacgatgcactggttggccacagcccggcgatgcgcaccgtgcacaagcgcatcggcttggcggccgcctctgatctgccggtgctgatcaccggggaaaccggcaccggcaaggaattggcggcacgcgcgttgcatcgcgccagcccgcgcgccagtgcgccattcgctgcagtcaactgcgcggccattccgctggaattgatggagagcgagctgttcggccatcgcaagggtgcgttttccggcgccagcagcgaccgacgcgggttgattcgcgaagccgatggcggcacgttgtttctggacgaaatcggcgacatgccattgccgatgcaggccaagctgctgcgtttcctgcaggaaggcgaggtgacgccattgggtggcagcggcccgcagaaggtggatgtgcgggtgctggccgccacccatcgcgacctggcggcctgcgtggccgacgggcgctttcgtagcgatctgcgttaccgcctcaatgtggtgccgatcgaactgccgccattgcgcgagcgtggccaggacatcctgttgctggcgcagcacttcctgagcgccaatgcagcgcgtgcgcagagcctgtcgccggccgcgcaggagcgcctgctcgcgcacctctggcctggcaatgtgcgcgaattgcgcaacgtcatgcagcgcagccaggtgttggtgcgtggcgccagcatcgatgcggcggatctggaggaagcgctgggcgaggctggcgaggcgccgccaaatggtgcatcggcgttgaccggcaccctgcccgaagcggtggcgcagctggaaaaacggatgatccagtcggcgctggaacagagccagggcaatcgggcagaggccgcgcgccggttggggatccaccggcaattgctctatcgcaagctggaggaatacggcttgtga

SEQ ID NO: 156925 - protein, 448 aa, Xanthomonas axonopodis pv. citri str. 306
MARILIIDDDAAFRTTLQATLRSLGHTAVAAENGPDGLARLSEGGIDMAFVDFRMPGMDGIAVLRARLDDAQARQVPLVMLTAHVSSGNTIEAMTLGAFDHLVKPVGRADIVEVVERALLSRAEAQAAATDALSAPVEDDDALVGHSPAMRTVHKRIGLAAASDLPVLITGETGTGKELAARALHRASPRASAPFAAVNCAAIPLELMESELFGHRKGAFSGASSDRRGLIREADGGTLFLDEIGDMPLPMQAKLLRFLQEGEVTPLGGSGPQKVDVRVLAATHRDLAACVADGRFRSDLRYRLNVVPIELPPLRERGQDILLLAQHFLSANAARAQSLSPAAQERLLAHLWPGNVRELRNVMQRSQVLVRGASIDAADLEEALGEAGEAPPNGASALTGTLPEAVAQLEKRMIQSALEQSQGNRAEAARRLGIHRQLLYRKLEEYGL

SEQ ID NO: 156926 - DNA, 1368 bp, Yersinia pestis KIM
  CDS (1)..(1368): transl_table=11
atgtaccacctgcgtctaataaggaatctcatgacaccacgcaaaccggccaatctactgctggttgacgacgatcccagcttattgaaattgctggggatgcgtttaaccagtgaagggtttaatgtcacgacagctgaaagcggtcacgaagcattgcgtttgttaatgcgtgagaaaattgacattgttatcagtgatctgcgaatggatgagatggacggcatggcgctgttcgctgaaattcaaaaatatcaaccggggatgcctgtgattatcctcacagcgcacggttcgatccctgatgccgttgccgcgacccagcaaggggtattcagttttctgaccaagcctgttgatcgcgatgcgctatataaggctattgatgcggcattagaactttcgattccagcgggtgatgatacttggcgtgaagagatagtgactcgcagcccggtcatgctacgtctgttagaacaagcgaaaatggtcgcacaatctgacgtcagtgtgctgattaacgggcaaagcggcaccggtaaagaggtattggcacaggctatccatgccgccagcccacgggccaaaaaagcctttattgccatcaactgtggtgccttaccagagcagttgctggagtctgaattattcggccatgctaagggtgcgtttaccggtgcagtcagcagccgtgaagggttgtttcaggccgctgaagggggcacattgttcctggatgagatcggcgatatgccgctctcattacaagtaaaattactgcgggtattgcaagagcgcaaagttcgtccattgggcagcaatcgtgatttaagtattaatgtccgggtgatttcagcgactcaccgtgacttgcccaaagcgatggcaaagaatgaattccgtgaagatctctactaccgtttaaatgtggttaacctaaaaatcccggcgctacacgagcgggcggaagatattccattgctggcaaaccatctattacgggagtcggctaagcggcataagccgtttgttcgcagtttctcaaacgatgcgatgaagcggttgatgacagccagttggcccggtaacgtgcgccaactggtcaacgtgattgagcaatgcgtggcgttgacctcggcaccggttatcagcgaagcgctggttgagcaggcgctggagggtgaaaataccgtattaccgacgtttgtggaggcccgtaatcaattcgaactaaactatttgcgtaagctattacaaattgccaaaggtaacgttacccaagccgctcgtatggcggggcgtaaccgtactgagttctataaattgttgtctcgccacgagttggatgccaacgattttaaagagtaa

SEQ ID NO: 156927 - protein, 455 aa, Yersinia pestis KIM
MYHLRLIRNLMTPRKPANLLLVDDDPSLLKLLGMRLTSEGFNVTTAESGHEALRLLMREKIDIVISDLRMDEMDGMALFAEIQKYQPGMPVIILTAHGSIPDAVAATQQGVFSFLTKPVDRDALYKAIDAALELSIPAGDDTWREEIVTRSPVMLRLLEQAKMVAQSDVSVLINGQSGTGKEVLAQAIHAASPRAKKAFIAINCGALPEQLLESELFGHAKGAFTGAVSSREGLFQAAEGGTLFLDEIGDMPLSLQVKLLRVLQERKVRPLGSNRDLSINVRVISATHRDLPKAMAKNEFREDLYYRLNVVNLKIPALHERAEDIPLLANHLLRESAKRHKPFVRSFSNDAMKRLMTASWPGNVRQLVNVIEQCVALTSAPVISEALVEQALEGENTVLPTFVEARNQFELNYLRKLLQIAKGNVTQAARMAGRNRTEFYKLLSRHELDANDFKE

SEQ ID NO: 156928 - DNA, 1326 bp, Shigella flexneri 2a str. 301
  CDS (1)..(1326): transl_table=11
atgacgcacgataatatcgatattctggtggtggatgatgacattagccactgcactattttgcaggctttactgcgcggctggggctataacgtcgcgctggcgaacagcgggcgacaggcgctggagcaggtgcgggaacaggtttttgatcttgtgctttgcgatgtgcgaatggcggagatggacggcatcgccacgctgaaagagatcaaagcgttaaacccggcaattccggtgctgattatgactgcgtactccagcgtcgagacggcggtagaggcactgaaaactggggcgcaggattatctcatcaagccgctggatttcgataacctacaggcgacgctggaaaaggcgctcgcgcatacgcacagtattgatgctgaaacacctgcggtgactgccagccagttcggtatggtcggtaaaagcccggcgatgcaacacctgctcagtgaaatcgccctcgtcgcgccatcggaagccacggtgctgatccacggcgattccggcaccggtaaagagctggtcgccagggcgattcacgccagtagcgcacgtagcgaaaaaccgctggtaacgctcaactgtgcggcactcaacgaatccttgctggaatctgaattgttcggtcacgaaaaaggggcgtttactggagccgataaacgccgggaagggcgctttgttgaggcggacggcggcacgctgtttctcgatgaaattggcgatatctcgccgatgatgcaggtgcgtctgctgcgtgcgattcaggagcgcgaagttcagcgtgtcggtagcaaccagactatctcggttgatgtccggctgattgcggcgacccatcgcgatcttgccgcagaggtgaatgccgggcgttttcgccaggatctctactatcgcctgaatgtggtggcgattgaagtaccatcgctgcggcaacggcgggaagatatccctctgctggctggccattttcttcagcgctttgccgagcgtaatcgcaaggcggtaaaaggctttacgccacaggcgatggatttgctgatccactacgactggccgggaaatattcgtgaactggaaaacgcggtggaacgggcggtggtgctgctgaccggggaatatatttccgaacgcgagctgccgctggcgattgccagtacgccgatcccgctggggcaaagtcaggatattcagccgctggtggaagtggaaaaagaggtgattctggcggcgctggagaaaacgggcggcaacaaaaccgaagccgcccgtcagttagggatcacgcgcaaaacgctattggcaaaactgtcgcgttag

SEQ ID NO: 156929 - protein, 441 aa, Shigella flexneri 2a str. 301
MTHDNIDILVVDDDISHCTILQALLRGWGYNVALANSGRQALEQVREQVFDLVLCDVRMAEMDGIATLKEIKALNPAIPVLIMTAYSSVETAVEALKTGAQDYLIKPLDFDNLQATLEKALAHTHSIDAETPAVTASQFGMVGKSPAMQHLLSEIALVAPSEATVLIHGDSGTGKELVARAIHASSARSEKPLVTLNCAALNESLLESELFGHEKGAFTGADKRREGRFVEADGGTLFLDEIGDISPMMQVRLLRAIQEREVQRVGSNQTISVDVRLIAATHRDLAAEVNAGRFRQDLYYRLNVVAIEVPSLRQRREDIPLLAGHFLQRFAERNRKAVKGFTPQAMDLLIHYDWPGNIRELENAVERAVVLLTGEYISERELPLAIASTPIPLGQSQDIQPLVEVEKEVILAALEKTGGNKTEAARQLGITRKTLLAKLSR

SEQ ID NO: 156930 - DNA, 1374 bp, Escherichia coli CFT073
  CDS (1)..(1374): transl_table=11
atgaaaagcccgcgccatccaccgatgaggtcactcctgatgagccataaacctgcgcatttattactggtcgatgatgatccgggattgctgaaactgcttggcctgcgcctgaccagcgaaggctacagcgtggtcacggcggaaagtggcgttgaaggattacgggtactgaatcgcgaaaaagtagatttagtcatcagcgacctgcggatggatgaaatggatggtatgcagctatttgctgaaattcagaaagtgcagccgggaatgccagtaattattcttaccgcgcatggttctattcctgatgccgttgctgcaacacagcagggcgtgttcagttttctcaccaagcctgtcgataaagatgcgctatatcaggcaattgacgatgcgctggaacaatccgcgccagccaccgacgaacgttggcgcgaggcgattgtcacccgcagcccgctgatgctgcgcttgctggaacaggcgcggctggtggcacaatcagacgttagcgttttgattaacggccagagcggcaccgggaaagagattttcgcccaggctatccacaacgccagcccgcgcaacagcaagccatttattgctattaactgtggcgcattacccgagcaattgctggagtcggagctgtttggtcatgcacgtggcgcgtttactggcgctgtcagcaatcgcgaaggtttattccaggcggcggaaggcggtacgctatttctcgatgagattggcgatatgcccgcaccgttgcaggtcaaactgctgcgcgtgttgcaggagcgtaaagtgcgcccgctgggcagtaaccgcgatattgatatcgacgtgcggattatttctgcgacccaccgcgacctgccaaaagcgatgacgcgcggggaattccgtgaagacctctattaccgcctcaacgttgtcagcctgaaaattccggccctggcggagcgcacagaagacattccgctactggcaaatcacctgttgcgccaggcggcagagcgacataaaccgtttgtccgcgcgttctccaccgatgcaatgaaacgcctgatgactgcgagctggccgggcaacgtgcgccagttggtcaacgtgattgaacagtgcgtggcgctgacatcatctccggtaattagtgatgcgctggtggagcaggcgctggagggcgaaaacacggcgctgccaacctttgttgaggcgcgtaatcagtttgaactcaactatttgcgtaagctgctgcaaatcaccaaaggcaacgtcacccacgcggcgagaatggcggggcgcaaccggacagaattttataaactgctttcccgacacgaactggatgcaaacgatttcaaggaatga

SEQ ID NO: 156931 - protein, 457 aa, Escherichia coli CFT073
MKSPRHPPMRSLLMSHKPAHLLLVDDDPGLLKLLGLRLTSEGYSVVTAESGVEGLRVLNREKVDLVISDLRMDEMDGMQLFAEIQKVQPGMPVIILTAHGSIPDAVAATQQGVFSFLTKPVDKDALYQAIDDALEQSAPATDERWREAIVTRSPLMLRLLEQARLVAQSDVSVLINGQSGTGKEIFAQAIHNASPRNSKPFIAINCGALPEQLLESELFGHARGAFTGAVSNREGLFQAAEGGTLFLDEIGDMPAPLQVKLLRVLQERKVRPLGSNRDIDIDVRIISATHRDLPKAMTRGEFREDLYYRLNVVSLKIPALAERTEDIPLLANHLLRQAAERHKPFVRAFSTDAMKRLMTASWPGNVRQLVNVIEQCVALTSSPVISDALVEQALEGENTALPTFVEARNQFELNYLRKLLQITKGNVTHAARMAGRNRTEFYKLLSRHELDANDFKE

SEQ ID NO: 156932 - DNA, 1326 bp, Escherichia coli CFT073
  CDS (1)..(1326): transl_table=11
atgacgcacgataatatcgatattctggtggtggatgatgacattagccactgcactattttgcaggctttgctgcgcggctggggttataacgtcgcgctggcgaacagcgggcgacaggcgctggagcaggtgcgggaacaggtttttgatcttgtgctttgcgatgtacgaatggcagagatggatggtatcgccacgctaaaagagatcaaaacattaaaccccgcgattccggtgctgattatgaccgcgtactccagcgtcgagacggcggtagaggcgttgaaaaccggggcgctggattatctcatcaagccgctggatttcgataacctgcaggcgacgctggaaaaggcgctcgcgcatacacacagtgttgacgctgaaacgcctgcggtgtctgccagccagttcggtatggtcggtaaaagcccggcgatgcaacacctgctcagtgaaatcgccctcgtcgcgccatcggaagccacggtgctgatccacggcgattccggcaccggtaaagagctggtcgccagggcgattcacgccagtagcgcacgtagcgaaaaaccgctggtaacgctcaactgcgcggcgctcaacgaatccttgctggagtctgaattgttcggtcacgaaaaaggggcgtttaccggggccgacaaacgccgggaagggcgctttgttgaggcggacggcggcacgctgtttctcgatgaaattggcgatatctcgccgatgatgcaggttcgtctgctgcgtgcgattcaggagcgcgaagttcagcgtgtcggcagcaaccagaccatctcggttgatgtccggctgattgcggcgactcatcgcgatcttgccgcagaggtgaatgccgggcgttttcgccaggatctctactatcgcctgaacgtggtggcgattgaagtaccatcgctgcgtcagcggcgggaagatattcctctgctggcaaaccattttcttcagcgctttgccgaacgtaatcgcaaggcggtaaaaggctttacgccccaggcgatggatctgctgattcattacgactggccgggaaatattcgtgaactggaaaacgcggtggaacgggcggtggtgctgctgaccggggaatatatttccgaacgcgagctgccgctggcgattgccagtacgccgatcccgctggtacaaagtcaggatattcagccgctggtggaagtcgaaaaagaggtgattctggcggcgctggagaaaacgggcggcaacaaaaccgaagccgcccgccagttagggatcacgcgcaaaacgctattggcaaaactgtcgcgttag

SEQ ID NO: 156933 - protein, 441 aa, Escherichia coli CFT073
MTHDNIDILVVDDDISHCTILQALLRGWGYNVALANSGRQALEQVREQVFDLVLCDVRMAEMDGIATLKEIKTLNPAIPVLIMTAYSSVETAVEALKTGALDYLIKPLDFDNLQATLEKALAHTHSVDAETPAVSASQFGMVGKSPAMQHLLSEIALVAPSEATVLIHGDSGTGKELVARAIHASSARSEKPLVTLNCAALNESLLESELFGHEKGAFTGADKRREGRFVEADGGTLFLDEIGDISPMMQVRLLRAIQEREVQRVGSNQTISVDVRLIAATHRDLAAEVNAGRFRQDLYYRLNVVAIEVPSLRQRREDIPLLANHFLQRFAERNRKAVKGFTPQAMDLLIHYDWPGNIRELENAVERAVVLLTGEYISERELPLAIASTPIPLVQSQDIQPLVEVEKEVILAALEKTGGNKTEAARQLGITRKTLLAKLSR

SEQ ID NO: 156934 - DNA, 1335 bp, Shigella flexneri 2a str. 2457T
  CDS (1)..(1335): transl_table=11
atgagccataaacctgcgcatttattattggtcgatgacgatccgggattgctgaaactgcttggcctgcgcctgaccagcgaaggctacagtgtggtcacggcggaaagtggcgctgaaggattacgggtactgaatcgcgaaaaagtagatttagttatcagcgacctgcggatggatgaaatggacggtatgcagctatttgctgaaatccagaaagtgcagccgggaatgccagtaattattcttactgcgcatggttctatccccgatgccgttgctgcaacacagcagggcgtttttagtttcctcaccaagcctgtcgataaagatgcgctatatcaggcaattgacgatgcgctggagcaatccgcgccagccaccgatgaacgctggcgcgaggcaattgtcacccgcagcccgctgatgctgcgtttgctggaacaggcgcggctggtggcgcaatcagacgtcagcgttttgattaacggtcagagcggcaccgggaaagagattttcgcccaggctatccacaacgccagcccgcgcaacagcaaaccatttattgctattaactgtggcgcattgcccgagcaattgctggagtcggagctgtttggtcatgcgcgtggcgcgtttactggcgctgtcagcaatcgcgaaggtttattccaggcggcggaaggcggaacgctatttctcgatgaaattggcgatatgcctgcgccgttacaggtcaaactgctgcgcgtgttgcaggagcgtaaagtgcgcccgctgggcagtaaccgcgatattgatatcaatgtgcggattatttctgccactcaccgtgatctgtcaaaagcgatggcgcgcggggaattccgcgaagatctctattaccgcctcaacgttgtcagcctgaaaattccggcactggcggagcgcacagaagacattccgctactggcaaatcacctgttgcgccaggcggcagagcgacataaaccgtttgtccgcgcgttctctaccgatgcgatgaaacgcctgatgaccgcgagctggccgggtaatgtgcgccagttggtcaacgtgattgaacagtgcgtggcgctgacctcatctccggtgattagtgatgcgctggtggagcaggcgctggagggtgaaaatacggcgctgccaacctttgttgaggcacgtaatcattttgaactcaactacttgcgtaagctgctgcaaatcaccaaaggcaacgtcacccacgcggcgagaatggcggggcgcaaccggacagaattttataaactgctttcccgacacgagctggatgcaaacgatttcaaggaatga

SEQ ID NO: 156935 - protein, 444 aa, Shigella flexneri 2a str. 2457T
MSHKPAHLLLVDDDPGLLKLLGLRLTSEGYSVVTAESGAEGLRVLNREKVDLVISDLRMDEMDGMQLFAEIQKVQPGMPVIILTAHGSIPDAVAATQQGVFSFLTKPVDKDALYQAIDDALEQSAPATDERWREAIVTRSPLMLRLLEQARLVAQSDVSVLINGQSGTGKEIFAQAIHNASPRNSKPFIAINCGALPEQLLESELFGHARGAFTGAVSNREGLFQAAEGGTLFLDEIGDMPAPLQVKLLRVLQERKVRPLGSNRDIDINVRIISATHRDLSKAMARGEFREDLYYRLNVVSLKIPALAERTEDIPLLANHLLRQAAERHKPFVRAFSTDAMKRLMTASWPGNVRQLVNVIEQCVALTSSPVISDALVEQALEGENTALPTFVEARNHFELNYLRKLLQITKGNVTHAARMAGRNRTEFYKLLSRHELDANDFKE

SEQ ID NO: 156936 - DNA, 1368 bp, Nitrosomonas europaea ATCC 19718
  CDS (1)..(1368): transl_table=11
atgatacaagacaagaaaattcttctggtggatgatgacagggatttgcttgaactgctttccatccgtctgacggcagccgggtatgaaaccacgcttgcagacagtactgaggcagcaatcaattatctcgacatttcccgtccccatctcgttatcagtgacatgcaaatgggcggtctcgatggcatggcgctgttcgagtacatccatcgcaacattccgacactgccggtcatcattttgactgcttacggtactatcccggatgccgtggcagcgacgcaacgcgggatttttggctatctcaccaagccttacgatcctaaaattctgctgggtcaggttgaacgcgccctcaatcttgcccctgccgttgaaacgctttccagcacgacacccgtttcctcatggcgcaagaccatcgttacccggagcgcggtcatggaagatctgcttgcaaaagtaggccgagtggcgcaaggggatgccagtgtgctgctgtccggtgaaagcggtgttggcaaggaattgcttgcccgtgccattcatcaggcttcccgacgttgtgatcagccgttcgttaccatcaattgcgcggccattccggaacaactgctggaatccgagctgtttggccatgccaaaggtgcatttaccggtgctgtgcgggatcataagggattattccagctggctgatggtggcagtctgtttctggatgagatcggtgacatgcctctgctgttacaggcaaaactgttgcatgcgctgcaggaaagagtcatccggcctgttggttccacccagagtattccaatcaatgtgcgcatcatctccgctacgcaccgggatctgaaatcggaaatccaggcgggaaattttcgtgaagatctgtattaccggcttttcgtggtggggctgacgattccctcacttgcccagcgcagtgaagatattcccctgctggccaatcattttctgcgtgtatttgccgagaaacatcagaaagatatcaatgtattttccccggaagcgatcagctttctgctggcatcctcctggccgggtaatattcggcagctcatgaatgtcgtcgaacaaagtgtcgtcatgagtgcggtgccgctcatctccggtgagcttgtccgtgatgccatgcacaaggatgaagagcagatgacgtcattcgatgaagcccgcagacagtttgaaagagattatctggtcaagatactgaaaattactgccggaaatgtgactcaggcagccaagctggccaaacgcaatcgcacggagttttataaattgctgcagcggcaccagcttgatttcacactctataaatcgttacaggaaaaggtctga

SEQ ID NO: 156937 - protein, 455 aa, Nitrosomonas europaea ATCC 19718
MIQDKKILLVDDDRDLLELLSIRLTAAGYETTLADSTEAAINYLDISRPHLVISDMQMGGLDGMALFEYIHRNIPTLPVIILTAYGTIPDAVAATQRGIFGYLTKPYDPKILLGQVERALNLAPAVETLSSTTPVSSWRKTIVTRSAVMEDLLAKVGRVAQGDASVLLSGESGVGKELLARAIHQASRRCDQPFVTINCAAIPEQLLESELFGHAKGAFTGAVRDHKGLFQLADGGSLFLDEIGDMPLLLQAKLLHALQERVIRPVGSTQSIPINVRIISATHRDLKSEIQAGNFREDLYYRLFVVGLTIPSLAQRSEDIPLLANHFLRVFAEKHQKDINVFSPEAISFLLASSWPGNIRQLMNVVEQSVVMSAVPLISGELVRDAMHKDEEQMTSFDEARRQFERDYLVKILKITAGNVTQAAKLAKRNRTEFYKLLQRHQLDFTLYKSLQEKV

SEQ ID NO: 156938 - DNA, 1341 bp, Chromobacterium violaceum ATCC 12472
  CDS (1)..(1341): transl_table=11
atgaacgcccccgcccgcatcgtcctggtggacgacgatcccgatctgctgtgcctggtccggctgcggcttgaggccgccggccacgaagtggaggcgctcgccagcgccgaggccgcgctggcagcgctggccgcgcgccgcgccgacctgttgctgaccgactggcgcttgcccggcatggacgggctgcagctgttcgaaaccgcgcgccgccgctatccgacgctgccggtcatcctgttcaccgcccacggcacggtgccggacgcggtggaggcggtcagccgcggcgtgttctgctacctggaaaaaccgttcgacggccagctgctgctggacaaggtggcccagggactggcgctgtccgcgggcgacggcgccgccggcgacgactggcgcgccggcatcgtcagccggggcccggcgatggaggaactgctgagcgaagcgcgcatggtggccgccaccgacgccagcgtgctgctgcagggcgaaagcggcagcggcaaggaagtgctggcgcgcgccattcatcaggccagccgccgcgctggccggccctttgtcgccgtcaactgcggcgcgatcccggaaaacctgctggaaagcgagctgttcggccacgagaagggcgccttcaccggcgccgccgcgcgccacgacggcctgatccgccaggcggacggcggcacgctgttcctggacgagatcggcgacatgccgctgccgctgcaggtgaagctgctgcgggtgctgcaggatcgcgaggtcaggccggtgggcgccagccggccgctgccggtggatatccggctgctgtcggccacccaccgcgatttgccggcccgcatcgccgacggccagttccgcgaggacctctactatcggctgaacgtggtgtcgctgaccctgccgcccttggccgagcggcgcgaggacatccccttgctggcgcagcatttcctgcagcaggtggccgcgcgctacggcaagtccgtcagcggcttcgcgcccgacgccctggccttcctcgccgccgcgcgctggccgggcaatatccgccagctggccaatgtggtggagcaatgctgcgtgctggcgaccggccccttgctgaccctggcccaggtggaaaaggcggtagccggcgagtcgcgcgcgattccgacgctggccgaggcgcggcgggacttcgaacgcgactacctggagcggctgctgcgcctgaccggcggcaacgtcagcgacgccgcccggctggccgaccgcaatcgcaccgagttctaccggctgctgcagaaacacgagctgaatgccgccgcgttcaaggacggctga

SEQ ID NO: 156939 - protein, 446 aa, Chromobacterium violaceum ATCC 12472
MNAPARIVLVDDDPDLLCLVRLRLEAAGHEVEALASAEAALAALAARRADLLLTDWRLPGMDGLQLFETARRRYPTLPVILFTAHGTVPDAVEAVSRGVFCYLEKPFDGQLLLDKVAQGLALSAGDGAAGDDWRAGIVSRGPAMEELLSEARMVAATDASVLLQGESGSGKEVLARAIHQASRRAGRPFVAVNCGAIPENLLESELFGHEKGAFTGAAARHDGLIRQADGGTLFLDEIGDMPLPLQVKLLRVLQDREVRPVGASRPLPVDIRLLSATHRDLPARIADGQFREDLYYRLNVVSLTLPPLAERREDIPLLAQHFLQQVAARYGKSVSGFAPDALAFLAAARWPGNIRQLANVVEQCCVLATGPLLTLAQVEKAVAGESRAIPTLAEARRDFERDYLERLLRLTGGNVSDAARLADRNRTEFYRLLQKHELNAAAFKDG

SEQ ID NO: 156940 - DNA, 1338 bp, Photorhabdus luminescens subsp. laumondii TTO1
  CDS (1)..(1338): transl_table=11
atgacagcgcgtaaaccagcccatcttcttctggttgatgatgatcctggtttgttgaaattgttgggaatgcgtcttaccagtgaaggttttcgtgtcacaaccgcagaaagtggcggtgaagcgttgagattgctaactaaagaaaaaatcgatttggtgatcagtgacctgcgtatggatgaaatggatggtatggcactgttcgctgaaatccagaagcagcaaccgggtatgccagttatcattctaacggctcatggctcaattccagaggcagtagcggccactcaacagggtgtctttagttttctgactaaacccgttgatcgggatgcgctttataaagcgattgatggtgcattggcgttgaccacgcctgccagtgatgaacagtggcgggaacagatagttacccgcagtcctgctatgttgcgtttgttggagcaggcgcgaatggttgctcaatctgatgtcagtgtactgataaacggtcagagtggtaccgggaaggaagtgctagcccaggcaattcaccgtgccagtccacgggcgaaaaaaccatttatcgcgattaactgtggtgctttgccggaacaactccttgagtcagaactgtttggtcatgctaaaggtgcatttaccggtgcggtcagcagccgtgaagggttattccttgctgcgcaggggggaacgctgtttcttgatgaaatcggtgatatgccacaggctttgcaggttaaattgttgcgcgtattgcaggaacgtaaaatacgtccgctcggaagtaaccgtgatctggatattgatgtacggattatctcagcgactcaccgtgatttaccgaaggcaatggcaaaaaatgagtttcgcgaagatctctattaccgcctaaatgtggtgaacttgaaaattccagctttgaatggccgggttgaagatattcctttattggcgaatcatctgttgcgtgaatcagcgaaacgccataaaccttttgtccgtagtttctcagttgatgcgatgaaatgcctgatggcggcaagttggcctggcaatgtgcgtcagcttgttaatgtgatcgaacagtgtgttgcgctgactactgcgccggttattagtgaagccttggttacgcaggcactagaaggggaaaatacagcgttacccacttttgtagaagccagaaatcagtttgaactgaattatctgcgtaaattactgcaaatgaccaaagggaatgtgactcatgcggcgcgtatggcggggcgtaaccggactgaattctacaaattactggcgcgccatgaattggatgcgaatgattttaaagaataa

SEQ ID NO: 156941 - protein, 445 aa, Photorhabdus luminescens subsp. laumondii TTO1
MTARKPAHLLLVDDDPGLLKLLGMRLTSEGFRVTTAESGGEALRLLTKEKIDLVISDLRMDEMDGMALFAEIQKQQPGMPVIILTAHGSIPEAVAATQQGVFSFLTKPVDRDALYKAIDGALALTTPASDEQWREQIVTRSPAMLRLLEQARMVAQSDVSVLINGQSGTGKEVLAQAIHRASPRAKKPFIAINCGALPEQLLESELFGHAKGAFTGAVSSREGLFLAAQGGTLFLDEIGDMPQALQVKLLRVLQERKIRPLGSNRDLDIDVRIISATHRDLPKAMAKNEFREDLYYRLNVVNLKIPALNGRVEDIPLLANHLLRESAKRHKPFVRSFSVDAMKCLMAASWPGNVRQLVNVIEQCVALTTAPVISEALVTQALEGENTALPTFVEARNQFELNYLRKLLQMTKGNVTHAARMAGRNRTEFYKLLARHELDANDFKE

SEQ ID NO: 156942 - DNA, 1371 bp, Geobacter sulfurreducens PCA
  CDS (1)..(1371): transl_table=11
atgaccgctccgaagattcttgccgtcgacgatgacgagctttctctcttgatgctggagaacctgctggccgatgcgggattcgcccccctgaccgcggtcagcggcgcacaggcgctggcgctgttggagcgggagcatgtggacctgctcatctccgacctgatcatggaggggatgaacggtctggaactcctggatcgggtcagggagcgctacccgaacgtgccggtcatcgtggtcacggcccgggggagcgtggagagcgccgtggaggccatgcggcggggcgcctacgactacctggcaaagcccttcaaccccgaggtgctgaggatcacgctccagcgggccctggactatcaccacgtggtccgcgagaacgagcagatcacggggctgttgcgcgagcggttcaccttccagagcatcgttacggtgaatccggccatgaagaagctgctggagctggccgccagggtggctgcggcgcggcagaccacggtggccatctacggcgaaagcggctcgggcaaggaggtgctggcgcgggccatccactttgccggcaaagggctgcccgccggattcgtggcggtcaactgcgcggccgtgcccgagcacttgctggagagcgagctgttcggccacgtgcggggggccttcaccggggccgaccgggatcgggagggaaagttcagtctggcccgcggcggcacgcttctgctggacgagatcggcgacatgcccctgccgctccaggccaagttgctgagagtcctccaggagcgcgtgttcgaaaagatcggcagcaatacccccatctcgacggattgccgcgttatcgtggccaccaaccgcaacctggccgacatggtggcggccggccgcttccgcgaagacctctatcaccggatcaacgtgtttcccttggtcattccgcctctgcgggagcgcaccgacgacatcccgctcctgtgcgagcacgtcctcgaccagctgcggcagcacctgggcaagccgctgcccggcatctcccagaaggccatggacgccatgctggcccacggctggccgggcaatgtgcgggagttgcgcaactgcctggagcgcgccgcgatcctgaccgacggcgagctgatccggcccgagcacctggggttcggcgcggccggagcccctgcccgggaaacatctgccggaccggcgcccgacacggtgcagtacgccctggcgctgcccgttgaccagttgtcgctccatgccctcaccgagcggatcatggccatcaccctggagcgctgcggcggcaacaagtccagggcggcccagctcctcaggatcgaccgcaaggcattctaccggggctga

SEQ ID NO: 156943 - protein, 456 aa, Geobacter sulfurreducens PCA
MTAPKILAVDDDELSLLMLENLLADAGFAPLTAVSGAQALALLEREHVDLLISDLIMEGMNGLELLDRVRERYPNVPVIVVTARGSVESAVEAMRRGAYDYLAKPFNPEVLRITLQRALDYHHVVRENEQITGLLRERFTFQSIVTVNPAMKKLLELAARVAAARQTTVAIYGESGSGKEVLARAIHFAGKGLPAGFVAVNCAAVPEHLLESELFGHVRGAFTGADRDREGKFSLARGGTLLLDEIGDMPLPLQAKLLRVLQERVFEKIGSNTPISTDCRVIVATNRNLADMVAAGRFREDLYHRINVFPLVIPPLRERTDDIPLLCEHVLDQLRQHLGKPLPGISQKAMDAMLAHGWPGNVRELRNCLERAAILTDGELIRPEHLGFGAAGAPARETSAGPAPDTVQYALALPVDQLSLHALTERIMAITLERCGGNKSRAAQLLRIDRKAFYRG

SEQ ID NO: 156944 - DNA, 1374 bp, Halorhodospira halophila SL1
  CDS (1)..(1374): transl_table=11
atgagtgaacgtccacgaatcctcgtcgtcgacgacgacccgagcctctgccggctcatggagatgcgcctggaggcctccggctacgcaccgaccacgtgcgaaagcggcgaacgggccctggccgagctggagcgccagcccgcggacgccgtgatcaccgacctgcgcatggaaggcatggacgggctggcgctgttcgatgccgtacgcgaacgctggccggcgctacccgtcatcatcctgaccgcccacggctccatccaggacgcggtcgaggcgacccgccgtggcgtgcacgaattcctcaccaagcccttcgacccccctgaactgctcgagcaactggagaaggccctcaccgcccgcggcgggcagacctccgataccgcccgcgaagccggtcggcgtcacggcctggtgacccgcagcccgcgcatggaagaggtccttgagcgtgccctgttggtggccgactccgacgccaatgtcctgatccagggagcgagcggctcaggtaaggagatcgtcgcccgcgccgtgcacggtaacagcccccgctcgcaagggccgttcatcccggtgaactgcggcgccatccctgagaccctgctcgaatccgaactcttcggccatgtccgcggcgccttcaccggcgccgatcgggatcgcgccggcctattccgcgacgccgacggcggcaccctgttcctcgacgagatcggtgatatgcccctgcagctgcaggtcaagctcctgcgggccctccaggagcaggtcatccgaccggtcggcggacgggatccgatccccatcaacgtgcgcgtcatctccgccacccaccgcgacctggaggcagcccgcgccgacgggtccttccgggaagacctctacttccgcctggccgtcgtcaccctcgccctgcccccgctggccgaacggcgtgaagacatccccctgctggcccggcacttcctggccgaggccacgcgtcgtcacgggcgccaggtcgaagacctgtcaccggaagccatcgaggcgttggtccaggccgagtggccgggcaacgtgcgccagctgcagaacgtcatcgagcagtgcgtggccctgagcaccaacgagatcctgccggagcgcctggtacggcaggcgctgaaccaggatcaggagccctcgattccgacgctggcggaggcccgtgaggcgttcgagcgcgactacctgatccgcctgctcaagctcaccgaggggaatgtgagccaggctgcccggctcgccggccgcaaccgcaccgagttttaccgcctgctcggtcgccaccacctccaggtggccgacttcaagggcggcaccgatccgaacgaggacaactag

SEQ ID NO: 156945 - protein, 457 aa, Halorhodospira halophila SL1
MSERPRILVVDDDPSLCRLMEMRLEASGYAPTTCESGERALAELERQPADAVITDLRMEGMDGLALFDAVRERWPALPVIILTAHGSIQDAVEATRRGVHEFLTKPFDPPELLEQLEKALTARGGQTSDTAREAGRRHGLVTRSPRMEEVLERALLVADSDANVLIQGASGSGKEIVARAVHGNSPRSQGPFIPVNCGAIPETLLESELFGHVRGAFTGADRDRAGLFRDADGGTLFLDEIGDMPLQLQVKLLRALQEQVIRPVGGRDPIPINVRVISATHRDLEAARADGSFREDLYFRLAVVTLALPPLAERREDIPLLARHFLAEATRRHGRQVEDLSPEAIEALVQAEWPGNVRQLQNVIEQCVALSTNEILPERLVRQALNQDQEPSIPTLAEAREAFERDYLIRLLKLTEGNVSQAARLAGRNRTEFYRLLGRHHLQVADFKGGTDPNEDN

SEQ ID NO: 156946 - DNA, 1281 bp, Aeromonas salmonicida subsp. salmonicida A449
  CDS (1)..(1281): transl_table=11
atgagccggatcctgctggttgacgacgatgtcagcctgctcaagctgatgagtatgcgcctgcgcagccagggctacgaagtggataccgccgacagcgccgaaggggcgctggacagactgcgccagcaacgggccgatctggtgttgagcgacttgcgcatggccggcatggacggcctggcgctgttcgagcgcatccagtcacagtggctggggttgcctgtcatcataatgacagcccacggcaccattcccgatgccatccaggctacccgctccggggtgttcagttttctcaccaagcccatcgacaaggatgagctgtttgccaccatagagcatgcgttgagcctgacacgcccaaagcagcaacaggagtggcaatcgctgatcctgacccgcaatccgcagatggaacagttgctgatccaagccaacagcatagccggcatggaagtgcccgtgctgatcatggggccgtccggttcaggtaaaggggtgatgactcaagccttgcatcaggccagcagtcgccgtgacaagccgctgcacgtcatcaactgcgctgccttgccgtggcctgcgctggatctgcagctgtttggcgaggacggtcagtccggcctgttcgaacaagccaaaggcgcgaccctgtttctcgacgagataggggacctgtcggaatcgctacaggccaagctgttgcaggtgttgcaggagtacggtcagggtacgcccgaggtgcgggtcatcagctccagccatcaggatctggtgacggcgatggaagaggggcgttttcgggaagatctcttctaccgcctcaatgtggccaacatcaccttgccacctctcagcgcccgcagtgaagacattccgctgctggccagacaggcgctggacgaatatcgcagtcgtcacagtgactgtgcggccctgggtttttcacccgagtcgctggccatgctggcggccgccgcctggcccggtaacgtgcgtcagctctacagcgtggtggaacagctggcgagcctctgttgcagtcctgtgattggggtgtccatggtggagtcggccctgagtggcggcggtggtggcatcccttcgttcaacgaggcgcgggccgagttcgagaaggagtatctgatccgtctgctgcgtaccactgagggcaacgtgaccctggcggccaacatggcgggcagaaaccgtaccgatttctacaagttgttgaatcggcacggcatagaggcggcaaacttcaaatcgaagggataa

SEQ ID NO: 156947 - protein, 426 aa, Aeromonas salmonicida subsp. salmonicida A449
MSRILLVDDDVSLLKLMSMRLRSQGYEVDTADSAEGALDRLRQQRADLVLSDLRMAGMDGLALFERIQSQWLGLPVIIMTAHGTIPDAIQATRSGVFSFLTKPIDKDELFATIEHALSLTRPKQQQEWQSLILTRNPQMEQLLIQANSIAGMEVPVLIMGPSGSGKGVMTQALHQASSRRDKPLHVINCAALPWPALDLQLFGEDGQSGLFEQAKGATLFLDEIGDLSESLQAKLLQVLQEYGQGTPEVRVISSSHQDLVTAMEEGRFREDLFYRLNVANITLPPLSARSEDIPLLARQALDEYRSRHSDCAALGFSPESLAMLAAAAWPGNVRQLYSVVEQLASLCCSPVIGVSMVESALSGGGGGIPSFNEARAEFEKEYLIRLLRTTEGNVTLAANMAGRNRTDFYKLLNRHGIEAANFKSKG

SEQ ID NO: 156948 - DNA, 1338 bp, Enterobacter sp. 638
  CDS (1)..(1338): transl_table=11
atgacaagccgcaaacctgcccatctcctgctggtggatgacgatcccggcttgctgaagctgttgggaatgcgcctggtcagcgaaggctacagcgttgtcaccgccgaaagtggacaggaagggctgaaagcgcttggtcgcgagaaaatcgatctggtgatcagcgatctgcgcatggacgagatggatggcatgcagctgttcgtcgaaatccagaagctgcagcccggaatgccggtcattattctcacggcccacggctcgattcctgatgcggtcgctgcaacacagcagggcgtgtttagcttcctgaccaagccggtggacaaagacgcgttgtataaagccatcgacgatgcgctggaacattccgctccgtccgttgatgaaaaatggcgtgaatccatcgtcacgcgcagcccgattatgctgcgcttgctggaacaagcgcgcatggtcgcgcaatccgacgtcagcctgctgattaatgggcagagcggaaccgggaaagagattctggcgcaggcgattcacaacgccagcccgcgcagcaaaaacgccttcatcgccattaactgcggtgcgctgccggaacagttgctggaatctgaactctttggccatgcacgcggcgcgtttacgggcgcggtgagtagcagggaagggctgttccaggctgcagaaggcgggacgctgttcctcgatgaaattggtgatatgcccgcgccattgcaggtcaaactgctgcgcgtgttgcaggagcgcaaagtgcgtccgctcggcagcaaccgtgatatcgacattaacgtgcgtattatctcggccactcaccgcgatttaccgaaagcgatggagcgtaaagagttccgcgaagatctctactaccgcctgaacgtcgtcaatctgaaaatccccgcgctggcggagcgtgcggaagatattccgctgctggcaaatcatcttctgcgccagtcggcggacagacataagccgtttgtgcgtgcgttttcaaccgatgcaatgaaacgactcatgaccgccggctggccgggtaacgtccgtcaactggtgaacgtgattgagcagtgcgtggcgctgacctcttcgccggtcattagcgatgcgctggtggagcaggcgcttgaaggcgaaaataccgcgctgccgacgtttgttgaagcgcgtaatcagttcgagctgaactatctgcgtaagctgctgcaaatcaccaagggcaacgtgacgcacgccgcgcgcatggctgggcgaaaccgtacagagttttataaactgctgtcgcgccatgagctggaagcgaacgactttaaagagtaa

SEQ ID NO: 156949 - protein, 445 aa, Enterobacter sp. 638
MTSRKPAHLLLVDDDPGLLKLLGMRLVSEGYSVVTAESGQEGLKALGREKIDLVISDLRMDEMDGMQLFVEIQKLQPGMPVIILTAHGSIPDAVAATQQGVFSFLTKPVDKDALYKAIDDALEHSAPSVDEKWRESIVTRSPIMLRLLEQARMVAQSDVSLLINGQSGTGKEILAQAIHNASPRSKNAFIAINCGALPEQLLESELFGHARGAFTGAVSSREGLFQAAEGGTLFLDEIGDMPAPLQVKLLRVLQERKVRPLGSNRDIDINVRIISATHRDLPKAMERKEFREDLYYRLNVVNLKIPALAERAEDIPLLANHLLRQSADRHKPFVRAFSTDAMKRLMTAGWPGNVRQLVNVIEQCVALTSSPVISDALVEQALEGENTALPTFVEARNQFELNYLRKLLQITKGNVTHAARMAGRNRTEFYKLLSRHELEANDFKE

SEQ ID NO: 156950 - DNA, 1356 bp, Bradyrhizobium sp. ORS278
  CDS (1)..(1356): transl_table=11
atggccaccatcctgatcgtcgacgacgatgcggcgctgcgcgacggtctcgcggagacgctgaccgatctcggtcacgacacgctaacggctgcatcggggcgcgaggcgatcggcatggtctcggccgagaccgacgccatcctgctcgacctgcgcatgcccgggatcgacggcatcgagaccttgcgtcggatccgtgccgacgccgaagcgccgccggtgatcgtgctgacggcctatgcaagcccggaaaacaccatcgaggcgatgcggctcggcgctttcgatcatctggtcaagccaatcggccgcgacgccctgcgtgagttgatcgagcggctgccgccgcgaacccggccgcagcaggacattcgcggccgcgatgacagcggcctgatcggcaccagcgaagcgatgcgacgggtgcagaagatcatcggtctcgccgccgacgccgacgcgacggtgctaatccgcggcgagaccggcaccggcaaggagctggtcgcacgcgcgctgcatgtccacagccggcgcagcgcgagccccttcatcgccgtgaactgcgcggcgatcccgcaggacctgctcgaaagcgagttgttcggccatgtgaaggggtccttcaccggcgccacctcggatcgctccggcgcatttcgcgatgccggcgcggggacactcttcctcgacgagatcggcgacatgccgcctgcgatgcaggccaagatcctgcgcgcgctgcaggagcgcgtgatcgcgccggtcggcggcaagccggtgagggtggccgcccgcgtcgtcgctgccacgcatcgcgatctcgccaggcaagtcgcgagcggcgccttccgcgaggatctctactatcgcttgaacgtcatcccgatcgagctgccgccgctgcgcgagcgcagcgaggacattctgctgctcgccggtcacttcctcgcgctcgctgccaatgggcgcgcgcgcccgcaactgagcgaagcggcgatcgacaagctcgttcgtgcgccctggcccggcaatgtgcgcgagctgcgcaatgtgatcgagcgcgcctgcgtgctgacgcgtggcggcttgatcgaagccgaggacatcgacatcgccgcagccccgatcgctgaggacatcgatccggcaacggatctgccggctgcggtcgcgcggctcgaggaacgcatgatccggcgcgcgctcgcggactgcagcggcaaccgcaccgaagccgcgcggcagctcaacatcaaccggcagctgctctacaccaagatgcagcgctacgggctcgctgaagaggcgtcaggaaatctgacgcgcatcgtcgggaaagacgacgtctag

SEQ ID NO: 156951 - protein, 451 aa, Bradyrhizobium sp. ORS278
MATILIVDDDAALRDGLAETLTDLGHDTLTAASGREAIGMVSAETDAILLDLRMPGIDGIETLRRIRADAEAPPVIVLTAYASPENTIEAMRLGAFDHLVKPIGRDALRELIERLPPRTRPQQDIRGRDDSGLIGTSEAMRRVQKIIGLAADADATVLIRGETGTGKELVARALHVHSRRSASPFIAVNCAAIPQDLLESELFGHVKGSFTGATSDRSGAFRDAGAGTLFLDEIGDMPPAMQAKILRALQERVIAPVGGKPVRVAARVVAATHRDLARQVASGAFREDLYYRLNVIPIELPPLRERSEDILLLAGHFLALAANGRARPQLSEAAIDKLVRAPWPGNVRELRNVIERACVLTRGGLIEAEDIDIAAAPIAEDIDPATDLPAAVARLEERMIRRALADCSGNRTEAARQLNINRQLLYTKMQRYGLAEEASGNLTRIVGKDDV

SEQ ID NO: 156952 - DNA, 1338 bp, Klebsiella pneumoniae subsp. pneumoniae MGH 78578
  CDS (1)..(1338): transl_table=11
atgacgatccgtaaaccggcgcgtttactgctggtggatgacgatccgggactgttgaagctactgggcatgcgcctggtcagcgaaggctacagcgtggtcaccgccgagagcgggccggaagcgctgcgcgtgctggggcgtgagaaagtggatctggtgattagcgatctgcggatggatgaaatggacggcctgcagctgtttagcgagatccagaagggccaccccggcatgccggtgatcattctcaccgctcacggttcgattcccgacgccgtggcggctacccagcagggggtgttcagcttcctgaccaagccggtcgataaagatgccttatataaagccattgatgaggcgctggagcagcgctcgccggccaccgacgaagcctggcgccaggcgattgtaacccgcagcccgctgatgctgcgcctgcttgagcaggccgggatggtggcgcaatcggatgtcagcgtactgattaatggccagagcgggaccgggaaggagatcgtcgcccaggcgatccacaacgccagcccgcgtcatgataagccgttcgtggcgatcaactgcggcgcgctgccggaacagctgctcgaatccgaactgtttggccatgcgcggggcgcttttaccggcgcggtcagtaaccgtgaaggattattccaggccgctgagggtggtacgctgtttctcgacgagatcggtgatatgccggttgcgttgcaggtgaagctgctgcgcgtcctgcaggagcgcaaggtgcgcccgctgggcagcaaccgcgatatcgaaatcaacgtgcggattatctccgccacccaccgcgacctgccgaaggcgatggcccgcggcgagtttcgtgaagacctgttctaccgcctcaacgtagtgaacctgaaaataccgccgctctccgaacgtacggaagacatcccgctgttggccaaccatctgctgcgtcagtccgccgatcgccataagccgttcgtgcgggcgttttccagcgatgcaatgaagcggctgatggccgccaaatggccgggcaacgtgcgccagctggtgaacgtgatcgagcagtgcgtggccctgacttcgtcgccagtgatcggcgacgcgctggttgagcaagcgctggagggcgagaacacggcgctgccgaccttcgtggaggcgcgcaatcagtttgagctgaactacctgcgcaagctgctgcaaattaccaagggcaacgtcactcacgccgcgcggatggcagggcgcaaccgcaccgaattctataagctgctgtcgcgccatgagctcgacgccaacgactttaaagagtag

SEQ ID NO: 156953 - protein, 445 aa, Klebsiella pneumoniae subsp. pneumoniae MGH 78578
MTIRKPARLLLVDDDPGLLKLLGMRLVSEGYSVVTAESGPEALRVLGREKVDLVISDLRMDEMDGLQLFSEIQKGHPGMPVIILTAHGSIPDAVAATQQGVFSFLTKPVDKDALYKAIDEALEQRSPATDEAWRQAIVTRSPLMLRLLEQAGMVAQSDVSVLINGQSGTGKEIVAQAIHNASPRHDKPFVAINCGALPEQLLESELFGHARGAFTGAVSNREGLFQAAEGGTLFLDEIGDMPVALQVKLLRVLQERKVRPLGSNRDIEINVRIISATHRDLPKAMARGEFREDLFYRLNVVNLKIPPLSERTEDIPLLANHLLRQSADRHKPFVRAFSSDAMKRLMAAKWPGNVRQLVNVIEQCVALTSSPVIGDALVEQALEGENTALPTFVEARNQFELNYLRKLLQITKGNVTHAARMAGRNRTEFYKLLSRHELDANDFKE

SEQ ID NO: 156954 - DNA, 1332 bp, Klebsiella pneumoniae subsp. pneumoniae MGH 78578
  CDS (1)..(1332): transl_table=11
atgagcagcgataaagtacagattctggtcgttgatgatgacgtcagccactgcacgatcctgcaggcgctgctgcgcggctggggctatcaggtggggttggctcacaacggcctgcaggcgctggagcagatccatcagcaggtcttcgacctggtgctgtgcgatatccgtatggcggagatggacggtatcgcaacgttaaaagagattaaggcctataacccggcgataccggtgctgatcatgacggcgttttccagcgtcggtacggcggtagaagctattaagtccggggcgctggattatctggttaaaccgctggattttgacaccctgcagcagacgctggttcaggcattggcgcacacccggcagagcgagagcgaccccagcgttgcgacggattcacggtggggcatgattggcgacagcccggcgatgcaggcgcttcttaacgatattacgctggtggccccttcggacgcgacggtgctgatttatggggagtcgggaaccggtaaggagctggtggcgcgcgccatccacgcctgcagcgagcgtcgtgacaagccgttggtcacgctcaactgcgcggcgctgaatgagtcactgctggagtcggaactcttcggccatgaaaaaggggcgtttaccggggcggatcggcgacgggaaggacgctttgtcgaagcggatggcggcacgctgtttcttgatgagataggcgatatctcgccagtgatgcaggtccgcttgctgcgggcgattcaggagcgggaggtgcagcgggtcggcagcaaccagacgcttgccgttgatgtgcggcttatcgccgccacccatcgcaaccttgcggaagaggtgagcgccgggcgctttcgccaggatctctattaccgactcaacgtcgtgaccatcgagataccgccgctgcgccggcgacgggaagatattccgcagctggcgcagcattttctcaaacgctataccgaacgcaatcgtaagacggtaaaggggttcacgccacaggcgatggacctgctgatccactacccctggccgggcaatattcgcgagctggaaaacgcggtggagcgggcggtggtgctactgaccggaaactatatctctgagcgagaactgcccctggcgatcgccggtacgccgctgccatcagtcgggagcgaggaggggggaattcagccgttagtggaagtggagaaagaggtgattctggcggcgctggaaaaaacgggcggcaacaaaaccgaagccgcccgtcagttaggcattacgcgcaaaacgctgctggcgaaacttagccgttag

SEQ ID NO: 156955 - protein, 443 aa, Klebsiella pneumoniae subsp. pneumoniae MGH 78578
MSSDKVQILVVDDDVSHCTILQALLRGWGYQVGLAHNGLQALEQIHQQVFDLVLCDIRMAEMDGIATLKEIKAYNPAIPVLIMTAFSSVGTAVEAIKSGALDYLVKPLDFDTLQQTLVQALAHTRQSESDPSVATDSRWGMIGDSPAMQALLNDITLVAPSDATVLIYGESGTGKELVARAIHACSERRDKPLVTLNCAALNESLLESELFGHEKGAFTGADRRREGRFVEADGGTLFLDEIGDISPVMQVRLLRAIQEREVQRVGSNQTLAVDVRLIAATHRNLAEEVSAGRFRQDLYYRLNVVTIEIPPLRRRREDIPQLAQHFLKRYTERNRKTVKGFTPQAMDLLIHYPWPGNIRELENAVERAVVLLTGNYISERELPLAIAGTPLPSVGSEEGGIQPLVEVEKEVILAALEKTGGNKTEAARQLGITRKTLLAKLSR

SEQ ID NO: 156956 - DNA, 1353 bp, Ochrobactrum anthropi ATCC 49188
  CDS (1)..(1353): transl_table=11
atgatgggcaagtcaccctccgttattcttgtcgacgatgacaaggcgctccgccgcgccactcgtcaaacgcttgagcttgccggttttgaggttactgattttccaagcgcactggatgcgttgaacagcgttacttttgagtatgatggcgttgtcgttaccgatgtccgcatgccgcagatcgacggtctccaattctttgcccggatcaaaaccattgaccccgatttgccagtaatcctgattactggccacggtgatattccgatggcggtgcaagccattcaggacggtgcctatgatttcatcgctaagccgtttgcagccgacaggctcgtgcacagcatccgtcgtgcatgggaaaagcgacagcttatcgttgaaaaccgcgccttacgcgaagccgccgagaatgtggagggcgatctgccgttgatcggccagacaccggcgatggaaaatctgcgccgtaccttgcgcgatatagccgatacggatgttgatgtgctcgtggctggtgaaactggcagtggcaaggaagtcgtcgcacagttgctgcacaactggggccatcgtcgcaaaggcaatttcgtagcgctcaactgcggggccttgcccgaaacggtgattgaaagcgaactgttcggtcacgaggcaggtgctttcacgggagctcagaaaaagcggctcggacgggttgaacatgcaagtggtggcacgctgtttctcgatgaaattgaaagcatgcctgcagcaacgcaagtgaaactgctgcgcgtccttgagatgcgcgaaatcacaccactcggcacgaatgaggttcgcccggtcgatctgcgggttgtggctgcagcaaagatcgacctcggtgaccccgcccagagaggcgacttccgtgaggacctctattaccggctgaatgttgtcacgctttccatcccgccgctgagagaaagacgagacgacattccgttgcttttcgcacatttcctgacgcgagcgtcgaaacgattcaatcgcgatgtgcccgctatcgatgcggccacacaccgacatctcatgaaccatagctggccgggaaatgtccgcgaattggcacattttgccgaccgcgtagcgcttggcgttgcgaaaccggctcacttgctgcaatcgatggtcggcaatcaagaaacacttccaaaacggctcgagcgctacgaagaagcgctcatccgcgaaacgcttgccgcccataatggcaatgttcaggaaacgattgaggcgctcggtattccgcgaaagaccttttacgataagatgcagcgtcatggcatcaatcgcgcggactatcgcgccaacggcgattga

SEQ ID NO: 156957 - protein, 450 aa, Ochrobactrum anthropi ATCC 49188
MMGKSPSVILVDDDKALRRATRQTLELAGFEVTDFPSALDALNSVTFEYDGVVVTDVRMPQIDGLQFFARIKTIDPDLPVILITGHGDIPMAVQAIQDGAYDFIAKPFAADRLVHSIRRAWEKRQLIVENRALREAAENVEGDLPLIGQTPAMENLRRTLRDIADTDVDVLVAGETGSGKEVVAQLLHNWGHRRKGNFVALNCGALPETVIESELFGHEAGAFTGAQKKRLGRVEHASGGTLFLDEIESMPAATQVKLLRVLEMREITPLGTNEVRPVDLRVVAAAKIDLGDPAQRGDFREDLYYRLNVVTLSIPPLRERRDDIPLLFAHFLTRASKRFNRDVPAIDAATHRHLMNHSWPGNVRELAHFADRVALGVAKPAHLLQSMVGNQETLPKRLERYEEALIRETLAAHNGNVQETIEALGIPRKTFYDKMQRHGINRADYRANGD

SEQ ID NO: 156958 - DNA, 1374 bp, Anaeromyxobacter sp. Fw109-5
  CDS (1)..(1374): transl_table=11
atgagcccgctcgcgcgcgtcctcgtcgtcgacgacgaccccggcgtccgctacacgctgcgcgagatcctcgagagcgaggggctggcggtggacgaggcggcggacggcgccgccgcgctggcgcgcctcgcggcctcgcccgccgagctcgtcgtgacggacctgcggatgccgggcgtcgacggcatggagctcctgcgccgcctcgtggggcgccccggcgcgccgcgggtcgtgctcgtcacggcgcacggctctgagcggcaggcggtcgaggcgatgaaggccggggcctacgactacttcaagaagcccttcgagaccgacgagctgctcgcggtggtgcgccgcgcgctcgaggcggtccggctcgcccacgacaacgagcggctccagagcgagctggtgctgtcccgctcgatggtgttcgcctccgaggcgatgcgccggctcgccgtcctggtcgcgcgcgtggcgccgcgcgacgtgacggtgctcgtcaccggcgagagcggcacgggcaaggagcgcgtggcggaggcgatcgtgcgggcctcgcggcgcgcggaccgcccgttcgtgcgcttcaactgcgccgcgctcacgccggagctcgccgaggcggagctcttcgggcacgcgaagggcgccttcaccggcgcggtgcgcgcgcggcccgggctgttcggcgaggccgacggcggcacgctcctgctcgacgaggtcggggagctcgcgccctcggcgcagggaaagctcctgcgggtcttgcaggagggcgaggtccggccggtcggcgaggagcgcgtccggcacgtggacgtgcgcgtgatcgccgccacgcaccgcgatctcccggagctggtgcgggcggggaggttccgcgaggatctctactaccggctcgacgtcgtccagctgcgcgtcccgccgctgcgggagcgcccagaggacatcccggtcctcgcgcgccacttcctccagcgcttcgcggagcggttcgggctcgcctccctcagcgtgcccgacgcgctcatggatcgcctggccgcgcacgcgtggcccggcaacgtgcgcgagctcgagaacgcggtcgaggggctcgtggcgctctccccgccggaggggctcgacctctccctgctgccgggcggcgccgcgacgggcgagcgcgtcgaggcgggcgcgccgccgtcgctgaagcagcgcgtcgaggcgttcgagcgcggtctcgtcgtggaggcgctccgcgcggcgggagggaaccgcagcgaggcggcccgccggctcggcgtctcgcgggtcacgctccacgacaagcttcgcaagtacgggctcggcgggggagacgaggaggcgggcgggcgctga

SEQ ID NO: 156959 - protein, 457 aa, Anaeromyxobacter sp. Fw109-5
MSPLARVLVVDDDPGVRYTLREILESEGLAVDEAADGAAALARLAASPAELVVTDLRMPGVDGMELLRRLVGRPGAPRVVLVTAHGSERQAVEAMKAGAYDYFKKPFETDELLAVVRRALEAVRLAHDNERLQSELVLSRSMVFASEAMRRLAVLVARVAPRDVTVLVTGESGTGKERVAEAIVRASRRADRPFVRFNCAALTPELAEAELFGHAKGAFTGAVRARPGLFGEADGGTLLLDEVGELAPSAQGKLLRVLQEGEVRPVGEERVRHVDVRVIAATHRDLPELVRAGRFREDLYYRLDVVQLRVPPLRERPEDIPVLARHFLQRFAERFGLASLSVPDALMDRLAAHAWPGNVRELENAVEGLVALSPPEGLDLSLLPGGAATGERVEAGAPPSLKQRVEAFERGLVVEALRAAGGNRSEAARRLGVSRVTLHDKLRKYGLGGGDEEAGGR

SEQ ID NO: 156960 - DNA, 1338 bp, Cronobacter sakazakii ATCC BAA-894
  CDS (1)..(1338): transl_table=11
atgacgcagcataaacccgcgcgcctgttgctggtggatgacgatccgggcctgctgaaactgctgggcctgcggctcaccagcgaaggatttaccgtcgagaccgctgaaagcggccatgaagggctgcgcattttggcgcgtgagaagatcgatctggtgattagcgatctgcggatggatgaaatggacggcatgcagcttttcgccgagatccagaagctccagccgggcatgccggtgatcattctgaccgcgcatggctcgatccctgatgcggtggcggcaacccagcagggtgtcttcagttttctcactaaaccggtggataaagacgcgctgtataaagctatcgatgatgcgctggcgcatgccgcgcccgcaggcgacgaacagtggcgcgagacgattgtcacccgcagccccgtgatgctgcggctgcttgagcaggcgcacatggtggcgcagtcggatgtcagcgtgctgattaacggccagagcggcaccggcaaagaaattctggcgcaggccatccataacgccagcccgcgcgccaaaaacgcgtttatcgccattaactgcggcgcgctgccggaacagctgctggaatctgagctgttcggccatgcgcgcggcgcgtttaccggcgcggtcagcagccgtgaagggctttttcaggcggctgaaggcggcacgctgtttctcgatgaaatcggcgatatgccggtaccgttgcaggtaaaactgctgcgtgtcctgcaggagcgcaaagtacgcccgctcggcagcaaccgcgatatcgatatcaacgtgcggattatctccgccacccaccgcgatctgccgaaggcaatggcgcgcggcgagttccgcgaagatctcttttatcgcctgaacgtggtgaatttaaagatcccggcgttgcaggagcgcgcggaagatattccgctgctggcgaaccatctgctgcgtcaggcggcggatcgccataagccgttcgtgcgcagtttctctaccgatgcgatgaagcgtctgatggcggcgagctggccgggcaacgtgcgccagctggtgaacgtgattgagcagtgcgtggcgctgacctccgcgccggtcattagcgaggcgctggtggagcaggcgctggagggcgagaacaccgtgctgccgacgtttgtcgaggcgcgcaatcagtttgagctcaactatctgcgcaagctgttgcaaatcaccaaaggcaatgtgacgcacgccgcgcggatggcggggcgtaaccgtaccgaattctataaactgctggctcgccacgagcttgaggcgaatgattttaaagagtag

SEQ ID NO: 156961 - protein, 445 aa, Cronobacter sakazakii ATCC BAA-894
MTQHKPARLLLVDDDPGLLKLLGLRLTSEGFTVETAESGHEGLRILAREKIDLVISDLRMDEMDGMQLFAEIQKLQPGMPVIILTAHGSIPDAVAATQQGVFSFLTKPVDKDALYKAIDDALAHAAPAGDEQWRETIVTRSPVMLRLLEQAHMVAQSDVSVLINGQSGTGKEILAQAIHNASPRAKNAFIAINCGALPEQLLESELFGHARGAFTGAVSSREGLFQAAEGGTLFLDEIGDMPVPLQVKLLRVLQERKVRPLGSNRDIDINVRIISATHRDLPKAMARGEFREDLFYRLNVVNLKIPALQERAEDIPLLANHLLRQAADRHKPFVRSFSTDAMKRLMAASWPGNVRQLVNVIEQCVALTSAPVISEALVEQALEGENTVLPTFVEARNQFELNYLRKLLQITKGNVTHAARMAGRNRTEFYKLLARHELEANDFKE

SEQ ID NO: 156962 - DNA, 1338 bp, Citrobacter koseri ATCC BAA-895
  CDS (1)..(1338): transl_table=11
atgataagccgcaaaccggcacatctgctgctcgtggacgatgatccggggctgttgaaactgctggggatgcgcctgaccagcgaaggctacagcgtcgtgacggcggaaagcggtcaggaagggctgcgcgtactgaatcgcgagaaagtggatctggtcattagcgatctgcggatggatgaaatggatggcatgcagctgttcacggaaatccagaaagtccagcctggcatgcccgtcatcattttgaccgcacacggctccattcctgatgcggtggcggcgacgcaaaaaggcgtgtttagctttctgaccaaaccggtcgataaagatgcgctgtatcaggccattgatgacgcgcttgaacaatcggcgccagcaatggacgacagctggcgcgaatcaatcgttacgcgcagtccgttgatgatacgcctgctggaacaggcgcggatggtggcgcaatcggatgtcagcgtgctgattaacgggcaaagcggcaccgggaaagagattttcgcgcaggctatccataacgccagcccgcgcagcagtaaacctttcatcgccattaactgcggcgcgctgccggaacagctactggagtccgaactgtttggccacgcgcgcggggcgtttaccggcgcggtcagcaaccgtgaagggttatttcaggcggcggaaggcggcacgctgtttcttgacgaaatcggcgatatgcccgcgccgttacaggttaagctgctgcgcgttctgcaagagcgcaaagtcagaccgcttggcagcaatcgcgatatcgatattgatgtgcgcattatctccgcaacgcaccgcgatctgcctaaggcgatggcgcggggtgaatttcgcgaagacttatattaccgtctgaacgtggtgagtctgaagatcccgacgctggcggagcgtacggaagatattccgctgctggcgaatcatcttctgcgccagtcagcagagcggcataaaccgtttgtgcgggcgttttcaacggatgcgatgaagcgtctgatgaccgcaagctggccgggaaacgtgcgtcagttggtgaacgttattgagcagtgcgtggcgttaacttcctcgccggtcatcagcgacgcgctggtggagcaggcgctggaaggcgaaaatacggcgctgccgacgtttgttgaggcgcgtaatcagtttgagcttaactacttgcgtaaactgctgcaaatcaccaaagggaatgtcacccatgcggcgagaatggcagggcgtaaccggacggaattttataagctgctctcgcgccatgagttagatgcaaacgatttcaaagagtag

SEQ ID NO: 156963 - protein, 445 aa, Citrobacter koseri ATCC BAA-895
MISRKPAHLLLVDDDPGLLKLLGMRLTSEGYSVVTAESGQEGLRVLNREKVDLVISDLRMDEMDGMQLFTEIQKVQPGMPVIILTAHGSIPDAVAATQKGVFSFLTKPVDKDALYQAIDDALEQSAPAMDDSWRESIVTRSPLMIRLLEQARMVAQSDVSVLINGQSGTGKEIFAQAIHNASPRSSKPFIAINCGALPEQLLESELFGHARGAFTGAVSNREGLFQAAEGGTLFLDEIGDMPAPLQVKLLRVLQERKVRPLGSNRDIDIDVRIISATHRDLPKAMARGEFREDLYYRLNVVSLKIPTLAERTEDIPLLANHLLRQSAERHKPFVRAFSTDAMKRLMTASWPGNVRQLVNVIEQCVALTSSPVISDALVEQALEGENTALPTFVEARNQFELNYLRKLLQITKGNVTHAARMAGRNRTEFYKLLSRHELDANDFKE

SEQ ID NO: 156964 - DNA, 1335 bp, Escherichia coli E24377A
  CDS (1)..(1335): transl_table=11
atgagccataaacctgcgcatttattattggtcgatgacgatccgggattgctgaaactgcttggcctgcgcctgaccagcgaaggctacagcgtggtcacggcggaaagtggtgctgaaggattacgggtactgaatcgcgaaaaagtagatttagtcatcagcgacctgcggatggatgaaatggacggtatgcagctgtttgctgaaatccagaaagtgcagccgggaatgccagtaattattcttaccgcgcatggttctattcccgatgccgttgctgcaacacagcagggcgtttttagtttcctcaccaagcctgtcgataaagacgcgctatatcaggcaattgacgatgcgctggaacaatccgcgccagccaccgacgaacgttggcgcgaggcgattgtcacccgcagcccgctgatgctgcgtttgctggaacaggcgcggctggtggcgcaatcagacgttagcgttttgattaacggccagagcggcaccgggaaagagattttcgcccaggctatccacaacgccagcccgcgtaacagcaagccgtttattgctattaactgtggtgcattgcccgagcaattgctggagtcggaactgtttggtcatgcgcgtggcgcgtttactggcgctgtcagcaatcgcgaaggtttattccaggcggcggaaggcggtacgctatttctcgatgagattggcgatatgcccgcaccgttgcaggtcaaactgctgcgcgtgttgcaggagcgtaaagtgcgcccgctgggcagtaaccgcgatattgatatcgacgtgcggattatttccgccactcaccgcgacctgccaaaagcgatggcgcgcggggaattccgcgaagatctctattaccgcctcaacgttgtcagcctgaaaattccggctctggcagagcgcacagaagacattccgctactggcaaatcacctgttgcgccaggcggcagagcgacataaaccgtttgtccgcgcgttctccaccgatgcaatgaaacgcctgatgaccgctagctggccgggtaatgtacgccagttggtcaacgtgattgaacagtgcgtggcgctgacctcatctccggtgattagcgatgcattagtagagcaggcgctggagggcgaaaacacggcgctgccaacctttgttgaggcacgtaatcagtttgaactcaactatttgcgtaagctgctgcaaatcaccaaaggcaacgtcacccacgcggcgagaatggcggggcgcaaccggacagaattttataaactgctttcccgacacgagctggatgcaaacgatttcaaggaatga

SEQ ID NO: 156965 - protein, 444 aa, Escherichia coli E24377A
MSHKPAHLLLVDDDPGLLKLLGLRLTSEGYSVVTAESGAEGLRVLNREKVDLVISDLRMDEMDGMQLFAEIQKVQPGMPVIILTAHGSIPDAVAATQQGVFSFLTKPVDKDALYQAIDDALEQSAPATDERWREAIVTRSPLMLRLLEQARLVAQSDVSVLINGQSGTGKEIFAQAIHNASPRNSKPFIAINCGALPEQLLESELFGHARGAFTGAVSNREGLFQAAEGGTLFLDEIGDMPAPLQVKLLRVLQERKVRPLGSNRDIDIDVRIISATHRDLPKAMARGEFREDLYYRLNVVSLKIPALAERTEDIPLLANHLLRQAAERHKPFVRAFSTDAMKRLMTASWPGNVRQLVNVIEQCVALTSSPVISDALVEQALEGENTALPTFVEARNQFELNYLRKLLQITKGNVTHAARMAGRNRTEFYKLLSRHELDANDFKE

SEQ ID NO: 156966 - DNA, 1338 bp, Serratia proteamaculans 568
  CDS (1)..(1338): transl_table=11
atgaccgcacgcaaaccggccaatttgttattggttgacgacgatcccagcctgcttaagctgctggggatgcgcctgaccagcgaaggatttcatgtcaccaccgccgaaagcggccaggaagcgctgcgcctgttagggcgtgagaagattgatctggtgatcagcgatctgcggatggatgaaatggacggcatggcactgtttgccgaaatccaaaagcatcagcccggcatgccggtgatcattcttaccgcccatggttcaatcccggacgcggtggcggctacccagcaaggggtgttcagcttcctgaccaaaccggtggatcgtgatgcgctgtataaagccatcgacgatgccctatcgctgtcactgccggccggtgatgacagttggcgtgaagacatcgtcacccgcagcccgattatgctgcgcctgctggagcaggcaaaaatggtggcgcagtcggacgtcagcgtattgattaacggccacagcggcaccggtaaagaggtgctggcacaggcgatccacggtgccagtcctcgcggtaaaaaggcgtttatcgccattaactgcggggcgctgccggagcaactgctggagtccgagctgtttggccatgccaaaggggcctttaccggcgcggtcagcagccgcgaagggctgttccaggcggcagccggcggcacgctgttccttgacgagatcggcgatatgccgctttcgctgcaggttaagctgttgcgcgtattgcaggagcgcaaggtgcgcccgctgggcagcaaccgcgatctggacattgacgttcgcatcatttccgccactcaccgcgatctgcaaaaggcgatggcgaaaaacgaattccgcgaggatttgtactaccggctgaacgtggtgaacctgaagatcccggcgttgaatgagcgtgccgaggatatcccgctgctggccaatcatctgctgcgcgaatcggccaagcgccataaacccttcgttcgcagcttctcaacggacgctatgaaacgcctgatgaccgccacctggccgggcaacgtgcgccaactggtgaacgtcatcgagcagtgtgtggccctgacttctgcgccggtgatcagcgaagcgctggttgagcaggcgttggaaggggaaaataccgccttgccgacctttgttgaggcccgcaatcagtttgagttgcactatctgcgcaagctgttgcagatcaccaagggtaacgtgacccaggccgcgcgcatggcaggccgcaaccgtaccgaattttataagttgctgtcgcgtcatgaattggacgccaacgattttaaagaatga

SEQ ID NO: 156967 - protein, 445 aa, Serratia proteamaculans 568
MTARKPANLLLVDDDPSLLKLLGMRLTSEGFHVTTAESGQEALRLLGREKIDLVISDLRMDEMDGMALFAEIQKHQPGMPVIILTAHGSIPDAVAATQQGVFSFLTKPVDRDALYKAIDDALSLSLPAGDDSWREDIVTRSPIMLRLLEQAKMVAQSDVSVLINGHSGTGKEVLAQAIHGASPRGKKAFIAINCGALPEQLLESELFGHAKGAFTGAVSSREGLFQAAAGGTLFLDEIGDMPLSLQVKLLRVLQERKVRPLGSNRDLDIDVRIISATHRDLQKAMAKNEFREDLYYRLNVVNLKIPALNERAEDIPLLANHLLRESAKRHKPFVRSFSTDAMKRLMTATWPGNVRQLVNVIEQCVALTSAPVISEALVEQALEGENTALPTFVEARNQFELHYLRKLLQITKGNVTQAARMAGRNRTEFYKLLSRHELDANDFKE

SEQ ID NO: 156968 - DNA, 1338 bp, Salmonella enterica subsp. arizonae serovar 62:z4,z23:--
  CDS (1)..(1338): transl_table=11
atgataagccgtaaaccggcgcacttgctgttggtcgatgacgatcccggattactgaaattgctcggtatgcgcctggccagcgaaggatacagcgtggttaccgcagagagcggccaggaagggctacggatactaaatcgggaaaaagtagatctggtgataagcgacctgcgcatggatgaaatggacggtatgcaactgttcacggaaattcaaaaagtacagccgggaatgccggttatcatcctgacggcgcacggttccattccggatgcggtggcggctacccagaagggcgtattcagctttctgacgaagccgatcgacaaagacgcgttatataaagcgatagatgaagcgctggagcagaccgctcccgcgacggacgatagctggcgcaaacctatcgttacccgtagtccgttaatgttgcggctgcttgaacaggcgcatatggtcgcgcagtcggatgtcagcgtgctgattaacggacaaagcggcaccgggaaagagatttttgcgcaggccattcataatgccagcccgcgtagtaacaagccatttgtcgccattaactgcggcgcgctgccggaacagttactggaatccgaattattcggccacgcgcgcggcgcctttaccggcgcggtgagcaatcgtgaagggttgttccaggcggcggaaggcggcacgctgtttctggatgaaattggcgatatgcccacgccgttgcaggtgaagttgctacgggtgctacaggagcgcaaagtcaggccgctgggcagcaatcgcgatattgatattgacgtgcgaattatttccgcgacgcaccgcgatctaccgaaggcgatggcgaggggcgagtttcgtgaagatttgtactatcgcctgaatgtggtcagcctgaaaattccggcgctggccgagcgtaccgaggatattccactgttggctaatcatctgctaaggcagtcggcgcagcgacataaaccgtttgtccgcgccttttctaccgatgcgatgaagcggctgatgacggcaagctggccgggaaacgtgcgccaactggtcaacgtcattgagcaatgcgtggcgctaacctcctcgccagtgatcagcgatgcgttggtcgagcaggctctggaaggtgaaaacaccgcgctgccaacctttgccgaagcgcggaatcaatttgagctgaattatctgcgtaagttactgcaaatcaccaaaggtaatgtgacacatgcagcaaggatggcggggcgtaaccggacggaattttacaagctactctcccgtcacgaactggatgcgaatgatttcaaagagtag

SEQ ID NO: 156969 - protein, 445 aa, Salmonella enterica subsp. arizonae serovar 62:z4,z23:--
MISRKPAHLLLVDDDPGLLKLLGMRLASEGYSVVTAESGQEGLRILNREKVDLVISDLRMDEMDGMQLFTEIQKVQPGMPVIILTAHGSIPDAVAATQKGVFSFLTKPIDKDALYKAIDEALEQTAPATDDSWRKPIVTRSPLMLRLLEQAHMVAQSDVSVLINGQSGTGKEIFAQAIHNASPRSNKPFVAINCGALPEQLLESELFGHARGAFTGAVSNREGLFQAAEGGTLFLDEIGDMPTPLQVKLLRVLQERKVRPLGSNRDIDIDVRIISATHRDLPKAMARGEFREDLYYRLNVVSLKIPALAERTEDIPLLANHLLRQSAQRHKPFVRAFSTDAMKRLMTASWPGNVRQLVNVIEQCVALTSSPVISDALVEQALEGENTALPTFAEARNQFELNYLRKLLQITKGNVTHAARMAGRNRTEFYKLLSRHELDANDFKE

SEQ ID NO: 156970 - DNA, 1326 bp, Escherichia coli ATCC 8739
  CDS (1)..(1326): transl_table=11
atgacgcacgataatatcgatattctggtggtggatgatgacattagccactgcactattttgcaggctttactgcgcggctggggctataacgtcgcgctggcgaacagcgggcgacaggcgctggagcaggtgcgggagcgagtttttgatcttgtgctttgcgatgtgcgaatggcggagatggacggcattgccacgctaaaagagatcaaagcgttaaatccggcgattccggtactgattatgaccgcatactccagcgtcgagacggcggtagaggcactgaaaaccggggcgctggattatctcatcaagccgctggatttcgataacctacaggcgacgctggaaaaggcgctcgcgcatacgcacagtattgatgctgaaacacctgcggtgactgccagccagttcggtatggtcggtaaaagcccggcgatgcaacacctgctcagtgaaatcgccctcgtcgcgccatcggaagccacggtgctgatccacggcgattccggcaccggtaaagagctggtcgccagggcgattcacgccagtagcgcacgtagcgaaaaaccgctggtaacgctcaactgtgcggcactcaacgaatccttgctggaatctgaattgttcggtcacgaaaaaggggcgtttactggagccgataaacgccgggaagggcgctttgttgaggcggacggcggcacgctgtttctcgatgaaattggcgatatctcgccgatgatgcaggtgcgtctgctgcgtgcgattcaggagcgcgaagttcagcgtgtcggtagcaaccagactatctcggttgatgtccggctgattgcggcgacccatcgcgatcttgccgcagaggtgaatgccgggcgttttcgccaggatctctactatcgcctgaatgtggtggcgattgaagtaccatcgctgcggcaacggcgggaagatatccctctgctggctggccattttctgcagcgctttgccgagcgtaatcgcaaggcggtaaaaggttttacgccccaggcgatggatctgttgattcattacgactggccgggaaatattcgtgagctggaaaacgcggtggaacgggcagtggtgctgctgaccggggaatatatttccgaacgcgagctgccgctggcgattgccagtacgccgatcccgctgggacaaagtcaggatattcagccgttggtggaagtggaaaaagaggtgattctggcggcgctggagaaaacgggcggcaacaaaaccgaagccgcccgtcagttagggatcacgcgcaaaacgctattggcaaaactgtcgcgttag

SEQ ID NO: 156971 - protein, 441 aa, Escherichia coli ATCC 8739
MTHDNIDILVVDDDISHCTILQALLRGWGYNVALANSGRQALEQVRERVFDLVLCDVRMAEMDGIATLKEIKALNPAIPVLIMTAYSSVETAVEALKTGALDYLIKPLDFDNLQATLEKALAHTHSIDAETPAVTASQFGMVGKSPAMQHLLSEIALVAPSEATVLIHGDSGTGKELVARAIHASSARSEKPLVTLNCAALNESLLESELFGHEKGAFTGADKRREGRFVEADGGTLFLDEIGDISPMMQVRLLRAIQEREVQRVGSNQTISVDVRLIAATHRDLAAEVNAGRFRQDLYYRLNVVAIEVPSLRQRREDIPLLAGHFLQRFAERNRKAVKGFTPQAMDLLIHYDWPGNIRELENAVERAVVLLTGEYISERELPLAIASTPIPLGQSQDIQPLVEVEKEVILAALEKTGGNKTEAARQLGITRKTLLAKLSR

SEQ ID NO: 156972 - DNA, 1326 bp, Escherichia coli SMS-3-5
  CDS (1)..(1326): transl_table=11
atgacgcacgataatatcgatattctggtggtggatgatgacattagccactgcactattttgcaggctttactgcgcggctggggctataacgtcgcgctggcgaacagcgggcgacaggcgctggagcaggtgcgggaacaggtttttgatcttgtgctttgcgatgtgcgaatggcagagatggacggcatcgccacgctcaaagagatcaaagcgttaaatccggcaattccggtactgattatgaccgcgtactccagcgtcgagacggcggtagaggcgttgaaaaccggggcgctggattatctcatcaagccgctggatttcgataacctgcaggcgacgctggaaaaggccctcgcgcatacgcacagtattgacgctgaaacgcctgcggtgtctgccagccagttcggtatggtcggtaaaagcccggcgatgcaacacctgctcagtgaaatcgccctcgtcgcgccatcggaagccacggtgctgatccatggcgattccggcaccggtaaagagctggtcgccagggcgattcacgccagtagcgcacggagtgaaaaaccactggtaacgctcaactgtgcggcactcaacgaatccttgctggaatctgaattgttcggtcacgaaaaaggggcgtttaccggggccgacaaacggcgggaggggcgctttgttgaggcggacggcggcacgttgtttctcgatgaaattggcgatatctcgccgatgatgcaggtgcgtctgctacgtgcgattcaggagcgcgaagttcagcgtgtcggcagcaaccagaccatctcggttgatgtccggctgattgcggcgactcatcgcgatcttgccgcagaggtgaatgccgggcgttttcgccaggatctctactatcgcctgaacgtggtggcgattgaagttccgtcgctgcgtcagcggcgggaagatattcctctgctgacaaaccattttcttcagcgctttgccgagcgtaatcgcaaggcggtaaaaggttttacgccccaggcgatggatctgctgattcactacgactggccgggaaatattcgtgaactggaaaacgcggtggaacgggcggtggtgctgctgaccggggaatatatttccgaacgcgagctgccgctggcgattgcgagtacgccgatcccgctggtacaaagtcaggatattcagccgctggtggaagtcgaaaaagaggtgattcttgcggcactggagaaaacgggcggcaacaaaaccgaagccgcccgtcagttagggatcacgcgcaaaacgctcttggcaaaactgtcgcgttag

SEQ ID NO: 156973 - protein, 441 aa, Escherichia coli SMS-3-5
MTHDNIDILVVDDDISHCTILQALLRGWGYNVALANSGRQALEQVREQVFDLVLCDVRMAEMDGIATLKEIKALNPAIPVLIMTAYSSVETAVEALKTGALDYLIKPLDFDNLQATLEKALAHTHSIDAETPAVSASQFGMVGKSPAMQHLLSEIALVAPSEATVLIHGDSGTGKELVARAIHASSARSEKPLVTLNCAALNESLLESELFGHEKGAFTGADKRREGRFVEADGGTLFLDEIGDISPMMQVRLLRAIQEREVQRVGSNQTISVDVRLIAATHRDLAAEVNAGRFRQDLYYRLNVVAIEVPSLRQRREDIPLLTNHFLQRFAERNRKAVKGFTPQAMDLLIHYDWPGNIRELENAVERAVVLLTGEYISERELPLAIASTPIPLVQSQDIQPLVEVEKEVILAALEKTGGNKTEAARQLGITRKTLLAKLSR

SEQ ID NO: 156974 - DNA, 1341 bp, Methylobacterium sp. 4-46
  CDS (1)..(1341): transl_table=11
atgagcggcggatccgaccggatcgtcttcgtcgacgacgaggaggacgtgcgccgggcgaaccggcagagcctcgaactcgacgggctcgccgtcgaggccttcccggcggccgagccggccctgcgggcgatcctcgccgacccgcccggcgtcgtggtgaccgacgtgcgcctgccgggcctcgacgggctcggcctgttccgcgccgtggccgaggccgatcccgacctgccggtgatcctgatcaccggccacggcgacatcaccatggcggtgcgggccatgcgggagggcgcctacgacttcctcgccaagccctacccggccgagcagctgatcggctcggtgcgccgggcgctggagcgccgccgcctcgtggtcgagaaccggaccctgcgcgagcggctcgacgcggcggtggcggaggatccggccttcctcggcatctcgcccgagatcgtgcggctgcgccgcttcgtccgcgacgtggccgaggccgatgtcgacgtgctgatcctcggcgagaccggctccggcaaggaggtggtggcgagcgcgctgcaccgctggggccggcggcggcgcggccagttcgtggcgatgaattgcggggcgctgcccgacagcgtggtggagagcgagctgttcggccacgaggccggcgccttcaccggggcggtgaagcggcgggtcgggcgcatcgagcacgcgagcggcggcacgctgttcctcgacgagatcgagagcatgcccctcgggctgcaggtgaagctgctgcgggtgctgcaggagcgcgcggtcgagccgctcggcaccaacgaggtgcgggcggtcgacctgcgggtcgtggccgccaccaaggtcgatctcggccaggccgccgcgcagggcaccttccgggacgacctctactaccggctcaacgtggtcacggtgacgatcccgcccctgcgcgagcgccgcgaggacgtggcgctgctcttcgagcacttcctctcccgcgccgccgcccgcttcaacaggccggtcccggcgctcaccccggcgatccgcgagatgctgaaccgtcacgcctggcccggcaacgtgcgcgaactcggccatttcgcggagcgctgcgcgctcggcctcggcccggcggcgccggaggagcgcgcgcccgcgcgcccgctcagcctcgccgaggaggtcgaccgcttcgagcgcgggcgcatccgcgacgagctgatcatggcccggggcgacgtgcgcctcgccgccgaggcgctcggcctcccgcgcaagacgctctacgacaagctcgcccggcacgggctcgacccgaccgacttccgctag

SEQ ID NO: 156975 - protein, 446 aa, Methylobacterium sp. 4-46
MSGGSDRIVFVDDEEDVRRANRQSLELDGLAVEAFPAAEPALRAILADPPGVVVTDVRLPGLDGLGLFRAVAEADPDLPVILITGHGDITMAVRAMREGAYDFLAKPYPAEQLIGSVRRALERRRLVVENRTLRERLDAAVAEDPAFLGISPEIVRLRRFVRDVAEADVDVLILGETGSGKEVVASALHRWGRRRRGQFVAMNCGALPDSVVESELFGHEAGAFTGAVKRRVGRIEHASGGTLFLDEIESMPLGLQVKLLRVLQERAVEPLGTNEVRAVDLRVVAATKVDLGQAAAQGTFRDDLYYRLNVVTVTIPPLRERREDVALLFEHFLSRAAARFNRPVPALTPAIREMLNRHAWPGNVRELGHFAERCALGLGPAAPEERAPARPLSLAEEVDRFERGRIRDELIMARGDVRLAAEALGLPRKTLYDKLARHGLDPTDFR

SEQ ID NO: 156976 - DNA, 1326 bp, Shigella boydii CDC 3083-94
  CDS (1)..(1326): transl_table=11
atgacgcacgataatatcgatattctggtggtggatgatgacattagccactgcactattttgcaggctttactgcgcggctggggctataacgtcgcgctggcgaacagcgggcgacaggcgctggagcaggtgcgggaacaggtttttgatcttgtgctttgcgatgtgcgaatggcggagatggacggcatcgccacgctgaaagagatcaaagcgttaaacccggcaattccggtgctgattatgactgcgtactccagcgtcgagacggcggtagaggcactgaaaactggggcgctggattatctcatcaagccgctggatttcgataacctacaggcgacgctggaaaaggcgctcgcgcatacgcacagtattgatgctgaaacacctgcggtgactgccagccagttcggtatggtcggtaaaagcccggcgatgcaacacctgctcagtgaaatcgccctcgtcgcgccatcggaagccactgtgctgatccacggcgattccggcaccggtaaagagctggtcgccagggcgattcacgccagtagcgcacgtagcgaaaaaccgctggtaacgctcaactgtgcggcactcaacgaatccttgctggaatctgaattgttcggtcacgaaaaaggggcgtttactggagccgataaacgccgggaagggcgctttgttgaggcggacggcggcacgctgtttctcgatgaaattggcgatatctcgccgatgatgcaggtgcgtctgctgcgtgcgattcaggagcgcgaagttcagcgtgtcggtagcaaccagactatctcggttgatgtccggctgattgcggcgacccatcgcgatcttgccgcagaggtgaatgccgggcgttttcgccaggatctctactatcgcctgaatgtggtggcgattgaagtaccatcgctgcggcaacggcgggaagatatccctctgctggctggccattttctgcagcgctttgccgagcgtaatcgcaaggcggtaaaaggttttactccccaggcgatggatctgttgattcattacgactggccgggaaatattcgtgagctggaaaacgcggtggaacgggcagtggtgctgctgaccggggaatatatttccgaacgcgagctgccgctggcgattgccagtacgccgatcccgctggggcaaagtcaggatattcagccgctggtggaagtggaaaaagaggtgattctggcggcactggagaaaacgggcggcaacaaaactgaagccgcccgtcagttagggatcacgcgtaaaacgttattggcaaaactgtcgcgttag

SEQ ID NO: 156977 - protein, 441 aa, Shigella boydii CDC 3083-94
MTHDNIDILVVDDDISHCTILQALLRGWGYNVALANSGRQALEQVREQVFDLVLCDVRMAEMDGIATLKEIKALNPAIPVLIMTAYSSVETAVEALKTGALDYLIKPLDFDNLQATLEKALAHTHSIDAETPAVTASQFGMVGKSPAMQHLLSEIALVAPSEATVLIHGDSGTGKELVARAIHASSARSEKPLVTLNCAALNESLLESELFGHEKGAFTGADKRREGRFVEADGGTLFLDEIGDISPMMQVRLLRAIQEREVQRVGSNQTISVDVRLIAATHRDLAAEVNAGRFRQDLYYRLNVVAIEVPSLRQRREDIPLLAGHFLQRFAERNRKAVKGFTPQAMDLLIHYDWPGNIRELENAVERAVVLLTGEYISERELPLAIASTPIPLGQSQDIQPLVEVEKEVILAALEKTGGNKTEAARQLGITRKTLLAKLSR

SEQ ID NO: 156978 - DNA, 1335 bp, Erwinia tasmaniensis Et1/99
  CDS (1)..(1335): transl_table=11
atgatcaaaacatcggtgcgattactgctggtcgatgatgaccccagcttgcttaagctgctgggaatgcgcctgcgcagtgaaggtttcaccgtggttaccgccggcagcggcccggaggcgctgcgtgtgctcaaccgcgaaaacttcgatctgaccatcagcgatctgcgcatggatgaaatggacggtatgacgctgtttgttgagatccagaagctaaagcccggcatgccggtgattattcttaccgcacatggttcgatccctgatgccgtggcggctacccgccagggggtattcagctttctcaccaaaccggtcgatcgcgatgcactttataaggccattgatgaggcgctggcacatcgagcgcccgttgcagacgaagcctggcgtgccaatatcgtcacccgtagcccactgatgctgcgtctgcttgagcagacccgcatggtcgcccagtctgatgtcagcgtattgatccacggccagagcggcacggggaaagaggtgctggcccaggcgatacatggtgccagcccgcgtgcaggcaaaacctttatcgccatcaactgcggtgcgctgccggaacagctgctggagtcagaactgttcggccacgcgaaaggggcctttaccggggcggtcagcagccgcgaggggctgttccaggccgccgaagggggaacgctgttccttgatgagataggcgatatgccacaggcgctgcaggtcaaactgctgcgcgtattgcaggagagaaaagtacggccgctgggcagcaatctcgacgtggatatcaacgttcggattatctccgctacccatcgcgacctgcccaaggcgatggagaaaaacgagttccgcgaggatttattctatcgcctcaacgtggtgagcctgaaaattccggcgctgcatgagcgcgccgaggacattccgctgctggcgacccacctactgaggcagtcggccgaaaggcataagccctttgtgcgcagcttctcgaccgatgcgatgcgccgtctgatggcggccagctggcctggcaacgtacgacagttggtcaacgtcattgagcagtgcgtggcgttaacgtcggcaccggtgattagcgatgtgctggttgaacaggcgctggcgggagaaaacacggtattgccaacgtttgtcgaggcgcgtaaccagtttgaattgaactacttgcgtaaactgctgcaaatgacgaaaggcaatgtgaccaacgccgcgcgtctggcaggccgtaaccgtaccgagttttataagctactatcacgccatgaactggatgcggcagatttcaaaggataa

SEQ ID NO: 156979 - protein, 444 aa, Erwinia tasmaniensis Et1/99
MIKTSVRLLLVDDDPSLLKLLGMRLRSEGFTVVTAGSGPEALRVLNRENFDLTISDLRMDEMDGMTLFVEIQKLKPGMPVIILTAHGSIPDAVAATRQGVFSFLTKPVDRDALYKAIDEALAHRAPVADEAWRANIVTRSPLMLRLLEQTRMVAQSDVSVLIHGQSGTGKEVLAQAIHGASPRAGKTFIAINCGALPEQLLESELFGHAKGAFTGAVSSREGLFQAAEGGTLFLDEIGDMPQALQVKLLRVLQERKVRPLGSNLDVDINVRIISATHRDLPKAMEKNEFREDLFYRLNVVSLKIPALHERAEDIPLLATHLLRQSAERHKPFVRSFSTDAMRRLMAASWPGNVRQLVNVIEQCVALTSAPVISDVLVEQALAGENTVLPTFVEARNQFELNYLRKLLQMTKGNVTNAARLAGRNRTEFYKLLSRHELDAADFKG

SEQ ID NO: 156980 - DNA, 1353 bp, Proteus mirabilis HI4320
  CDS (16)..(1353): transl_table=11
ataaggagaatgtgcatggctggccataaatcagcgaatcttttacttgtcgatgatgatccgggattattaaagctactgggtatgcgattaacaagtgaagggtttcatatcgttaccgctgaaagtgggcaagaagcacttaaactattattaaaagaaaaaatcgatctggtgatcagcgatttacgtatggatgaaatggatggtatggcgctatttgcagaaatacagcgccaacaacccggtatgcctgtgattattttaactgcacatggctccattcctgatgctgtcgcggcaactcaacagggggtgtttagtttcttgactaaacctgttgatagagatgcgctttataaagctatcgatgaagcattagaattagtgacgacggtatctgatgaagagtggtcaaaagatatcgtgacccgtagcccccaaatgttacgtttattagagcaagccaagttagttgcacaatccgatgttagcgtactgattaatgggcaaagcggtacaggtaaagaagtccttgctcaagcaatccaccgcgccagcccacgagctaaaaaaccctttattgctattaactgcggtgctttacctgaacaattattagaatctgaactatttggacatgctaaaggtgcttttactggcgcggtaagtagtcgtgaaggacttttccaagcggcagaagggggcactctatttctggatgaaattggtgatatgccaatggcattgcaagtgaaattactgcgtgtattacaagagcgtaaagtgcggccattaggcagtaatcgtgatattgatattgatgtgcgtattctttctgcaacccatcgtgacttgccaaaagcgatggagcgtaatgaatttcgagaagatttatactatcgtttaaatgtggtgaatttacgtatccccacgttgagcgaaagagccgaggatattcctgttcttgctaaccatttattgcgcgaatcagcaaaacgacataaaccttttgtgcgtagcttctcaacggatgcgatgaaatgtctaatgacagcaagttggccgggaaatgtgcgtcagttagttaacgtcatcgagcaatgtgtcgctttaacgactgcacctgtgattagcgaagcccttgtcacacaagcattgcaaggggaaaataccgcattacctacttttgctgaagcaagaggccattttgagatgacctatttaaggaagttattgcagatgacaaagggcaatgtcactcaagctgcaaggatggcagggcgaaatcgaacagaattttataaattgttgtcacgtcatggacttgatgccaatgatttcaaagaatga

SEQ ID NO: 156981 - protein, 445 aa, Proteus mirabilis HI4320
MAGHKSANLLLVDDDPGLLKLLGMRLTSEGFHIVTAESGQEALKLLLKEKIDLVISDLRMDEMDGMALFAEIQRQQPGMPVIILTAHGSIPDAVAATQQGVFSFLTKPVDRDALYKAIDEALELVTTVSDEEWSKDIVTRSPQMLRLLEQAKLVAQSDVSVLINGQSGTGKEVLAQAIHRASPRAKKPFIAINCGALPEQLLESELFGHAKGAFTGAVSSREGLFQAAEGGTLFLDEIGDMPMALQVKLLRVLQERKVRPLGSNRDIDIDVRILSATHRDLPKAMERNEFREDLYYRLNVVNLRIPTLSERAEDIPVLANHLLRESAKRHKPFVRSFSTDAMKCLMTASWPGNVRQLVNVIEQCVALTTAPVISEALVTQALQGENTALPTFAEARGHFEMTYLRKLLQMTKGNVTQAARMAGRNRTEFYKLLSRHGLDANDFKE

SEQ ID NO: 156982 - DNA, 1386 bp, Acidithiobacillus ferrooxidans ATCC 53993
  CDS (1)..(1386): transl_table=11
atgcccagaccagctcccatcatcctgaccatcgacgatgatcccgactttctgcgcctgctcggcctctggctggaaagtgagggataccacgtcctggccagcagtgatcccgtgcagggcatgcagacgttgcagacggccagaccggatctggtcatcaccgatctgcgcatgcccggcatggatggaatggccgtgctggagacggtgcaggccctcgatcccgacctccccgttatcctcctcaccgcccacggcagcatccccaacgccgtggcagccatgcgtgcccaggctttcggatatctgagcaaacccttcagcaatgaagagctccaggagttgaccaccgccgccctggcgcagcgccacgccgggcaggaaacccgcaagctccgggcggcgttgcggcaacaggccgggcagagcatcctccatcgtagccccgccatggcggcgctggtggatgagctggcgtgcgttgccaactcgaaagccagcgttttcctttccggagaaagcggatccggcaaagaacgggtcgctcgtgccatccacgacgccagcccacgccgtgacggcccgttcgttgcggtcaattgcggtgccatccccgccgggctggcggagagcgaactcttcggccatgtcaagggcgccttcaccggcgccacccaggatcacaccggattgatccgcagcgccagcggcggcactctgttcctcgacgaaatcgccgacctgcctctcactctgcaggtcaaattgctccgcgtccttcaggaaggttccttgcgccccgtcggcgccaaaacggaaatttccgtcgacctgcgggtcatcagtgccacccatcaggacattcacgccctcaccgccgacggcaccttccgcgaggatctttactatcgcctgcatgtcatcccgctgcgggtccccagcctgagcgaaagggcggaagacatcccgctgctggcccagcactttctggaccgcgagagtcagcgcatgaaccgggatatcctgggtttcagtcccgaggccctcgacaagctgatgcaacgatcctggcccggcaacgtccgggaattggagaatgccgtcacctttgccgcggccgtcaccgaaaaaggctgggtcgccgccgacgccatccctgacaacggccgccagggtggccagagcgcctttcctcccctgcaggacgccaaggcggcctttgagcgcggctacctggaaaacctgctacgcgcgacggatggcaacatctcccgtgccgcacgcattgccggccgacaccggacggatctttacaagctgatgcgtaagcacagtctggctccgcaacttttcaagaatcccgaggaccgggatgaggaatag

SEQ ID NO: 156983 - protein, 461 aa, Acidithiobacillus ferrooxidans ATCC 53993
MPRPAPIILTIDDDPDFLRLLGLWLESEGYHVLASSDPVQGMQTLQTARPDLVITDLRMPGMDGMAVLETVQALDPDLPVILLTAHGSIPNAVAAMRAQAFGYLSKPFSNEELQELTTAALAQRHAGQETRKLRAALRQQAGQSILHRSPAMAALVDELACVANSKASVFLSGESGSGKERVARAIHDASPRRDGPFVAVNCGAIPAGLAESELFGHVKGAFTGATQDHTGLIRSASGGTLFLDEIADLPLTLQVKLLRVLQEGSLRPVGAKTEISVDLRVISATHQDIHALTADGTFREDLYYRLHVIPLRVPSLSERAEDIPLLAQHFLDRESQRMNRDILGFSPEALDKLMQRSWPGNVRELENAVTFAAAVTEKGWVAADAIPDNGRQGGQSAFPPLQDAKAAFERGYLENLLRATDGNISRAARIAGRHRTDLYKLMRKHSLAPQLFKNPEDRDEE

SEQ ID NO: 156984 - DNA, 1374 bp, Acidithiobacillus ferrooxidans ATCC 53993
  CDS (1)..(1374): transl_table=11
atggaaaaaggcagaatcttactcgtggatgatgacgccgatctcctgcgtctgttgtccctgcgcatgaaggcggccggctatgtggtcagcaccgcggccagcggcagcgaagcgttgtcggtactggcgatggagcacccgtccctggtcatcaccgatctcaagatggatgagatggacggtatggcgctgctggacgccattcgccgcgactacccgacgttgcccgtcatcatccttaccgcccacggttccatccccgatgccctgctggccgctgaccagggtgtctttgccttcctcaccaagccttttgatggcaaggatctgatggcgcaggtggagcgtgccttcaacctgacggcggcggttcccccttcttcgggcaagaagggccgggactccagttgggaccggatcctgacccgcagccccaaaatgcagacggtgctggatcaggcgcgtctggtggcggcatccgatgccagcgtcttcattcatggcgccagtggtaccggtaaggaactgctggcccaggccatccatcaggcgagtccgcgccatggccacgcctttattgccgtcaactgcgcggcctttcccgagcaactgctggagtcggaactcttcgggcacaaaaagggcgccttcaccggagcggccagcagtcatcagggcctgttccaggcggcggagggcggcacgctttttctggacgaaattggcgatatgcctctcccgttacaggtcaaactgctgcgcgccctgcaggaacggatgattcgtccggtcggcgccaccgagagcatcgccgtcgacgtgcggatcatctccgccagtcaccgggatttggagcaggagatggctgcccggcgtttccgggatgatctctactatcgcctttgcgtggtgaccctggaacttcccgccctggcggagcgcccggaggatatcccgctgctggccgagtttttcctgcgagatgcggcggccaagaatcgcaaggacgttcgcgggatcgcgccggaagccatggaactgctcgtatcggcgccctggccgggcaatgtccggcagctcgccaacgtcatcgaacaggcggtggtgctgtccactaccccgcgaatcggggcgcccctcatccgtcatgccttgcgtgaccgggaaggggaggtcatgcctctggccgatgccaagggccgtttcgagatgaattatctgatccagatcatgcgcatgacccgcggcaacgtgagtcaggccgcacaactcgcacagcgcaaccgcaccgagttttatcgcctcctgcaccgctaccacctcgatcccgccgccttcaaggaagccggtggtgaagcggaggaggagtag

SEQ ID NO: 156985 - protein, 457 aa, Acidithiobacillus ferrooxidans ATCC 53993
MEKGRILLVDDDADLLRLLSLRMKAAGYVVSTAASGSEALSVLAMEHPSLVITDLKMDEMDGMALLDAIRRDYPTLPVIILTAHGSIPDALLAADQGVFAFLTKPFDGKDLMAQVERAFNLTAAVPPSSGKKGRDSSWDRILTRSPKMQTVLDQARLVAASDASVFIHGASGTGKELLAQAIHQASPRHGHAFIAVNCAAFPEQLLESELFGHKKGAFTGAASSHQGLFQAAEGGTLFLDEIGDMPLPLQVKLLRALQERMIRPVGATESIAVDVRIISASHRDLEQEMAARRFRDDLYYRLCVVTLELPALAERPEDIPLLAEFFLRDAAAKNRKDVRGIAPEAMELLVSAPWPGNVRQLANVIEQAVVLSTTPRIGAPLIRHALRDREGEVMPLADAKGRFEMNYLIQIMRMTRGNVSQAAQLAQRNRTEFYRLLHRYHLDPAAFKEAGGEAEEE

SEQ ID NO: 156986 - DNA, 1338 bp, Klebsiella pneumoniae 342
  CDS (1)..(1338): transl_table=11
atgacgatccgtaaaccggcgcgtttgctgctggtggatgacgatccgggactgttgaagctgctgggcatgcgtctggtcagcgaaggctacagcgtggtcaccgccgagagcgggccggaagcgctgcgcgtgctggggcgtgagaaagtggatctggtgattagcgatctgcggatggatgaaatggacggcctgcagctgttcagcgagatccagaaagggctgcccggcatgccggtgattattctcaccgcccatggttcgattcccgacgccgtggccgcgacccagcagggggtgttcagcttcctgaccaagccggtcgataaagatgccttgtataaagccattgatgaggcgctggagcagcgctcgccggccaccgacgaagcctggcgccaggcgattgtgacccgcagcccgctgatgctgcgtctgcttgagcaggccgggatggtggcgcaatcggatgtcagcgtgctgattaacggccagagtgggaccgggaaggagatcgtcgcccaggcgatccataacgccagcccgcgtcatgataaaccgttcgtggcgatcaactgcggcgcgctgccggaacagctgctcgaatccgaactgtttggccatgcgcggggcgcctttaccggcgcggtcagtaaccgtgaaggattattccaggccgctgagggcggtacgctgtttctcgacgagatcggtgatatgccggttgcgctgcaggtgaagctgctgcgcgtcctgcaggagcgtaaggtgcgtccgctgggcagcaaccgcgatatcgagatcaacgtgcggatcatctccgcgacccaccgcgacctgccgaaggcgatggcccgcggcgagttccgcgaagatctgttttaccgactcaacgtggtgaatctgaagatcccaccgctttccgaacgggctgaggatatcccgctgctggctaatcatttgctgcgccagtccgccgatcgccataagccgtttgtccgggcgttttccagcgatgcgatgaagcggctgatggccgccaagtggccgggtaacgtgcgccagctggtgaacgtgattgaacagtgtgtggccctgacctcgtcgccggtgattggcgacgcgctggtggagcaggcgctggaaggagagaataccgcgctgccgaccttcgtggaggcgcgcaatcagtttgagctgaactacctgcgcaagctgctgcaaattactaaaggcaatgtcacccacgccgcgcggatggcagggcgcaaccgcaccgaattctataaactgctgtcgcgccatgagctcgacgccaacgactttaaagagtag

SEQ ID NO: 156987 - protein, 445 aa, Klebsiella pneumoniae 342
MTIRKPARLLLVDDDPGLLKLLGMRLVSEGYSVVTAESGPEALRVLGREKVDLVISDLRMDEMDGLQLFSEIQKGLPGMPVIILTAHGSIPDAVAATQQGVFSFLTKPVDKDALYKAIDEALEQRSPATDEAWRQAIVTRSPLMLRLLEQAGMVAQSDVSVLINGQSGTGKEIVAQAIHNASPRHDKPFVAINCGALPEQLLESELFGHARGAFTGAVSNREGLFQAAEGGTLFLDEIGDMPVALQVKLLRVLQERKVRPLGSNRDIEINVRIISATHRDLPKAMARGEFREDLFYRLNVVNLKIPPLSERAEDIPLLANHLLRQSADRHKPFVRAFSSDAMKRLMAAKWPGNVRQLVNVIEQCVALTSSPVIGDALVEQALEGENTALPTFVEARNQFELNYLRKLLQITKGNVTHAARMAGRNRTEFYKLLSRHELDANDFKE

SEQ ID NO: 156988 - DNA, 1332 bp, Klebsiella pneumoniae 342
  CDS (1)..(1332): transl_table=11
atgagcagcgataaagtacagattctggttgtcgatgatgacgtcagccactgcacaattctgcaggcgctgctgcgcggctggggctatcaggtggcgttagctcacaacggcctgcaggcgctggagcagatccagaaccaggtcttcgacctggtgctgtgcgatatccgtatggcggagatggacggtatcgcgacgttaaaagagataaaagcctataacccggcgataccggtgctgatcatgacggcgttttccagcgtcggtacggcggtggaggccattaagtccggggcgctggattatctggtcaaaccgctggattttgacaccctgcagcagacgctggttcaggcgctggcacacacgcaacagagcaagatcgatcccagcgttgcgacggattcacggtggggcatgattggcgaaagcccggcgatgcaggcgcttatcaacaatattacgctggtggcgccctcggatgcgacggtgctgatctgcggcgaatcgggaaccggtaaagaactggtggcgcgcgccattcacgcctgcagcgaacgccgcgagaagccgctggtgacgctaaactgcgcggcgctgaatgagtcgctgctggagtccgagctgttcggtcatgaaaaaggggcgtttaccggggcggatcggcggcgggaagggcgttttgtcgaggcggatggcggcacgctgttccttgatgaaattggtgatatctcaccgctgatgcaggtgcgtctgctgcgggcgattcaggaacgcgaggtgcagcgcgttggcagtaaccagacgcttgccgttgatgtgcggctgattgccgctacccatcgtaatctggcggaggaggtgagcgccgggcgctttcgccaggatctctattatcgcctgaacgtcgtgaccattgatatgccgccgctgcgtcagcgccgggaagacattcctctactggcgcaacactttcttaagcgctatgccgaacgcaatcgcaaaacggtgcaggggtttacgccgcaggcgatggatctgctgatccactacccctggccgggtaatatccgtgaactggaaaacgcggtggagcgggcggtggtgctgctgaccggaaactatatctccgaacgagaactgccgctggcgatagcgggcacgccgttgccgtcgggtggtagcgagaacgcgctgattcagccgttagtggaagttgaaaaagaggtgattctggcggcgctggaaaaaacgggcggcaacaaaactgaagccgcccgtcagttaggcattacgcggaaaacgctgctggcaaaacttagccgttag

SEQ ID NO: 156989 - protein, 443 aa, Klebsiella pneumoniae 342
MSSDKVQILVVDDDVSHCTILQALLRGWGYQVALAHNGLQALEQIQNQVFDLVLCDIRMAEMDGIATLKEIKAYNPAIPVLIMTAFSSVGTAVEAIKSGALDYLVKPLDFDTLQQTLVQALAHTQQSKIDPSVATDSRWGMIGESPAMQALINNITLVAPSDATVLICGESGTGKELVARAIHACSERREKPLVTLNCAALNESLLESELFGHEKGAFTGADRRREGRFVEADGGTLFLDEIGDISPLMQVRLLRAIQEREVQRVGSNQTLAVDVRLIAATHRNLAEEVSAGRFRQDLYYRLNVVTIDMPPLRQRREDIPLLAQHFLKRYAERNRKTVQGFTPQAMDLLIHYPWPGNIRELENAVERAVVLLTGNYISERELPLAIAGTPLPSGGSENALIQPLVEVEKEVILAALEKTGGNKTEAARQLGITRKTLLAKLSR

SEQ ID NO: 156990 - DNA, 1335 bp, Escherichia fergusonii ATCC 35469
  CDS (1)..(1335): transl_table=11
atgagccataaacctgcgcatttattactggtcgatgacgatccaggattgctgaaactgcttggcctgcgtctgaccagcgaaggctacagcgtggtcacggcagaaagtggagctgaaggattgcgggtactgaatcgcgaaaaagtagatttagtcatcagcgacctgcggatggatgaaatggacggtatgcagttgtttgccgaaatccagaaagtgcagccgggaatgccggtaattattcttaccgcccatggttccattcccgatgccgttgccgcgacacagcagggcgtgttcagtttcctcaccaagcctgtcgataaagacgcgctgtatcaggcaattgacgatgctctggagcaatcagctcccactaccgacgaacgctggcgcgaggcgattgtcactcgtagtccgttaatgttgcgcttgttggaacaggcgaggctggtggcgcagtcagatgttagcgttttgattaacggtcagagcggtaccgggaaagagatttttgcccaggcgatccacaacgccagcccgcgcaacagcaagccgtttattgctattaactgtggcgcattacccgagcaattactggagtccgagctgtttggtcatgcgcgcggtgcgtttactggcgctgtcagcaatcgcgaaggtttattccaggcggcggaaggcggtacgctgtttctcgatgagattggcgacatgcccgcaccgttgcaggtcaaactgctacgcgtgttgcaggagcgcaaagtgcgcccgctgggcagcaaccgcgatattgatatcgacgtgcggattatttccgccactcaccgtgacctgccaaaggcgatggcgcgcggggaattccgtgaagatctctactatcgcctcaacgttgtcagtctgaaaattccggcattggcggagcgcacagaagacattccgctactggcaaatcacctgttgcgccaggcggcagagcgacataaaccatttgtccgcgcgttctccaccgatgcaatgaaacgcctgatgaccgcgagctggccgggcaacgtgcgccagttggtcaacgtgattgaacagtgcgtggcgctgacatcatctccggtaattagtgatgcgttagtcgagcaggcgctggagggcgaaaatacggctctgccaacatttgtcgaagcgcgtaatcagtttgaactcaactacttgcgtaagctgctgcaaatcaccaaaggtaatgtcacccacgcggcgagaatggcggggcgcaaccggacagaattttataaactgctttcccgacacgagctggatgcaaacgatttcaaggaatga

SEQ ID NO: 156991 - protein, 444 aa, Escherichia fergusonii ATCC 35469
MSHKPAHLLLVDDDPGLLKLLGLRLTSEGYSVVTAESGAEGLRVLNREKVDLVISDLRMDEMDGMQLFAEIQKVQPGMPVIILTAHGSIPDAVAATQQGVFSFLTKPVDKDALYQAIDDALEQSAPTTDERWREAIVTRSPLMLRLLEQARLVAQSDVSVLINGQSGTGKEIFAQAIHNASPRNSKPFIAINCGALPEQLLESELFGHARGAFTGAVSNREGLFQAAEGGTLFLDEIGDMPAPLQVKLLRVLQERKVRPLGSNRDIDIDVRIISATHRDLPKAMARGEFREDLYYRLNVVSLKIPALAERTEDIPLLANHLLRQAAERHKPFVRAFSTDAMKRLMTASWPGNVRQLVNVIEQCVALTSSPVISDALVEQALEGENTALPTFVEARNQFELNYLRKLLQITKGNVTHAARMAGRNRTEFYKLLSRHELDANDFKE

SEQ ID NO: 156992 - DNA, 1335 bp, Escherichia coli ED1a
  CDS (1)..(1335): transl_table=11
atgagccataaacctgcgcatttattactggtcgatgacgatccgggattgctgaaactgcttggcctgcgcctgaccagcgaaggctacagtgtggtcacggcggaaagtggtgctgaaggattgcgggtactgaatcgcgaaaaagtagatttagtcatcagcgacctgcggatggatgaaatggacggtatgcagctgtttgctgaaatccagaaagtgcagccgggaatgccagtaattattcttaccgcgcatggttctattcctgatgccgttgctgcaacacagcagggcgtgttcagttttctcatcaagcctgtcgataaagatgcgctatatcaggcaattgacgatgcgctggaacaatccgcgccagccaccgacgaacgttggcgcgaggcgattgtcacccgcagcccgctgatgctgcgcttgctggaacaggcgcggctggtggcacaatcagacgttagcgttttgattaacggccagagcggcaccgggaaagagattttcgcccaggctatccacaacgccagcccgcgcaacagcaagccatttattgctattaactgtggcgcattacccgagcaattgctggagtcggagctgtttggtcatgcacgtggcgcgtttactggcgctgtcagcaatcgcgaaggtttattccaggcggcggaaggcggtacgctatttctcgatgagattggcgatatgcccgcaccgttgcaggtcaaactgctgcgcgtgttgcaggagcgtaaagtgcgcccgctgggcagtaaccgcgatattgatatcgacgtgcggattatttctgcgacccaccgcgacctgccaaaagcgatgacgcgcggggaattccgtgaagacctctattaccgcctcaacgttgtcagcctgaaaattccggcactggcggagcgcacagaagacattccgctactggcaaatcacctgttgcgccaggcggcagagcgacataaaccgtttgtccgcgcgttctccaccgatgcaatgaaacgcctgatgactgcgagctggccgggcaacgtgcgccagttggtcaacgtgattgaacagtgcgtggcgctgacatcatctccggtaattagtgatgcgctggtggagcaggcgctggagggcgaaaacacggcgctgccaacctttgttgaggcgcgtaatcagtttgaactcaactatttgcgtaagctgctgcaaatcaccaaaggcaacgtcacccacgcggcgagaatggcggggcgcaaccggacagaattttataaactgctttcccgacacgaactggatgcaaacgatttcaaggaatga

SEQ ID NO: 156993 - protein, 444 aa, Escherichia coli ED1a
MSHKPAHLLLVDDDPGLLKLLGLRLTSEGYSVVTAESGAEGLRVLNREKVDLVISDLRMDEMDGMQLFAEIQKVQPGMPVIILTAHGSIPDAVAATQQGVFSFLIKPVDKDALYQAIDDALEQSAPATDERWREAIVTRSPLMLRLLEQARLVAQSDVSVLINGQSGTGKEIFAQAIHNASPRNSKPFIAINCGALPEQLLESELFGHARGAFTGAVSNREGLFQAAEGGTLFLDEIGDMPAPLQVKLLRVLQERKVRPLGSNRDIDIDVRIISATHRDLPKAMTRGEFREDLYYRLNVVSLKIPALAERTEDIPLLANHLLRQAAERHKPFVRAFSTDAMKRLMTASWPGNVRQLVNVIEQCVALTSSPVISDALVEQALEGENTALPTFVEARNQFELNYLRKLLQITKGNVTHAARMAGRNRTEFYKLLSRHELDANDFKE

SEQ ID NO: 156994 - DNA, 1326 bp, Escherichia coli 55989
  CDS (1)..(1326): transl_table=11
atgacgcacgataatatcgatattctggtggtggatgatgacattagccactgcactattttgcaggctttactgcgcggctggggctataacgtcgcgctggcgaacagcgggcgacaggcgctggagcaggtgcgggagcgggtttttgatcttgtgctttgcgatgtgcgaatggcagagatggacggcattgccacgctaaaagagatcaaagcgttaaatccggcgattccggtactgattatgaccgcatactccagcgtcgagacggcggtagaggcactgaaaaccggggcgctggattatctcatcaagccgctggatttcgacaccctgcaggcgacgctggaaaaggcgctcgcgcatacgcacagtattgatgctgaaacgcctgcggtgactgccagccagttcggtatggtcggtaaaagcccggcgatgcaacacctgctcagtgaaatcgccctcgtcgcgccatcggaagccacggtgctgatccacggcgattccggcaccggtaaagagctggtcgccagggcgattcacgccagtagcgcacgtagcgaaaaaccgctggtaacgctcaactgtgcggcactcaacgaatccttgctggaatctgaattgttcggtcacgaaaaaggggcgtttactggagccgataaacgccgggaagggcgctttgttgaggcggacggcggcacgctgtttctcgatgaaattggcgatatctcgccgatgatgcaggtgcgtctgctgcgtgcgattcaggagcgcgaagttcagcgtgtcggtagcaaccagactatctcggttgatgtccggctgattgcggcgacccatcgcgatcttgccgcagaggtgaatgccgggcgttttcgccaggatctctactatcgcctgaatgtggtggcgattgaagtaccatcgctgcggcaacggcgggaggatatccctctgctggctagccattttcttcagcgttttgccgagcgtaatcgcaaggcggtaaaaggctttacgccacaggcgatggatttgctgatccactacgactggccgggaaacattcgtgaactggaaaacgcggtggaaaggtcggtggtgctgctgaccggggaatatatttccgaacgcgagctgccgctggcgattgccagtacgccgatcccgctggggcaaagtcaggatattcagccgctggtggaagtcgaaaaagaagtgattctggcggcactggagaaaacgggcggcaacaaaaccgaagccgcccgtcagttagggatcacgcgcaaaacgctattggcaaaactgtcgcgttag

SEQ ID NO: 156995 - protein, 441 aa, Escherichia coli 55989
MTHDNIDILVVDDDISHCTILQALLRGWGYNVALANSGRQALEQVRERVFDLVLCDVRMAEMDGIATLKEIKALNPAIPVLIMTAYSSVETAVEALKTGALDYLIKPLDFDTLQATLEKALAHTHSIDAETPAVTASQFGMVGKSPAMQHLLSEIALVAPSEATVLIHGDSGTGKELVARAIHASSARSEKPLVTLNCAALNESLLESELFGHEKGAFTGADKRREGRFVEADGGTLFLDEIGDISPMMQVRLLRAIQEREVQRVGSNQTISVDVRLIAATHRDLAAEVNAGRFRQDLYYRLNVVAIEVPSLRQRREDIPLLASHFLQRFAERNRKAVKGFTPQAMDLLIHYDWPGNIRELENAVERSVVLLTGEYISERELPLAIASTPIPLGQSQDIQPLVEVEKEVILAALEKTGGNKTEAARQLGITRKTLLAKLSR

SEQ ID NO: 156996 - DNA, 1335 bp, Escherichia coli IAI39
  CDS (1)..(1335): transl_table=11
atgagccataaacctgcgcatttattattggtcgatgacgatccgggattgctgaaactgcttggcctgcgcctgaccagcgaaggctacagcgtggtcacggcggaaagtggcgttgaaggattacgggtactgaatcgcgaaaaagtagatttagtcatcagcgacctgcggatggatgaaatggatggtatgcagctatttgctgaaattcagaaagtgcagccgggaatgccagtaattattcttaccgcgcatggttctattcccgatgccgttgcagcaacacagcagggcgtttttagtttcctcaccaagcctgtcgataaagacgcgctatatcaggcaattgacgatgcgctggaacaatccgcgccagccaccgacgaacgctggcgcgaggcgattgtcacccgcagcccgctgatgctgcgtttgctggaacaggcgcggctggtggcgcaatcagacgttagcgttttgattaacggccagagcggcaccgggaaagagattttcgcccaggctatccacaacgccagcccgcgcaacagcaaaccatttattgctattaactgtggcgcattgcccgagcaattgctggagtcggagctgtttggtcatgcgcgtggtgcgtttactggcgctgtcagcaatcgcgaaggtttattccaggcggcggaaggcggtacgctatttctcgatgagattggcgatatgcccgcaccgttgcaggtcaaactgctgcgcgtgttgcaggagcgtaaagtgcgcccgctgggcagtaaccgcgatattgatatcgacgtgcggattatttctgccactcaccgcgacctgccaaaagcgatggcgcgcggggaattccgcgaagatctctattaccgcctcaacgttgtcagcctgaaaattccggcactggcggagcgcacagaagacattccgctactggcaaatcacctgttgcgccaggcggcagagcgacataaaccgtttgtccgcgcgttctccaccgatgcgatgaaacgcctgatgaccgcgagctggccgggtaatgtgcgccagttggtcaacgtgattgaacagtgcgtggcgctgacctcatctccggtgattagcgatgcattagtagagcaggcgctggagggtgaaaatacggcgctgccaacctttgttgaggcacgtaatcagtttgaactcaactatttgcgtaagctgctgcaaattaccaaaggcaacgtcacccacgcggcgagaatggcggggcgcaaccggacagaattttataaactgctatcccgacacgagctggatgcaaacgatttcaaggaatga

SEQ ID NO: 156997 - protein, 444 aa, Escherichia coli IAI39
MSHKPAHLLLVDDDPGLLKLLGLRLTSEGYSVVTAESGVEGLRVLNREKVDLVISDLRMDEMDGMQLFAEIQKVQPGMPVIILTAHGSIPDAVAATQQGVFSFLTKPVDKDALYQAIDDALEQSAPATDERWREAIVTRSPLMLRLLEQARLVAQSDVSVLINGQSGTGKEIFAQAIHNASPRNSKPFIAINCGALPEQLLESELFGHARGAFTGAVSNREGLFQAAEGGTLFLDEIGDMPAPLQVKLLRVLQERKVRPLGSNRDIDIDVRIISATHRDLPKAMARGEFREDLYYRLNVVSLKIPALAERTEDIPLLANHLLRQAAERHKPFVRAFSTDAMKRLMTASWPGNVRQLVNVIEQCVALTSSPVISDALVEQALEGENTALPTFVEARNQFELNYLRKLLQITKGNVTHAARMAGRNRTEFYKLLSRHELDANDFKE

SEQ ID NO: 156998 - DNA, 1326 bp, Escherichia coli UMN026
  CDS (1)..(1326): transl_table=11
atgacgcacgataatatcgatattctggtggtggatgatgacattagccactgcactattttgcaggctttgctgcgcggctggggctataacgtcgcgttggcgaacagcgggcgacaggcgctggagcaggtgcgggaacaggtttttgatcttgtgctttgcgatgtgcgaatggcagagatggacggcatcgccacgctcaaagagatcaaagcgttaaatccggcaattccggtactgattatgaccgcgtactccagcgtcgagacggcggtagaggcgttgaaaaccggggcgctggattatctcatcaagccgctggatttcgataacctgcaggcgacgctggaaaaggcgctcgcacatacgcacagtgttgacgctgaaacgcctgcggtgtctgccagccagttcggtatggtcggtaaaagcccggcgatgcaacacctgctcagtgaaatcgccctcgtcgcgccatcggaagccacggtgctgatccacggcgattccggcaccggtaaagagctggtcgccagggcgattcacgccagtagcgcacggagtgaaaaaccactggtaacgctcaactgtgcggcactcaacgaatccttgctggaatctgaattgttcggtcacgaaaaaggggcgtttaccggagccgacaaacggcgggaagggcgctttgttgaggcggacggcggcacgctgtttctcgatgaaattggcgatatctcgccgatgatgcaggttcgtctgctgcgtgcgattcaggagcgcgaagttcagcgtgtcggcagcaaccagaccatctcggttgatgtccggctgattgccgcgacccatcgcgatcttgccgcagaggtgaatgccgggcgttttcgccaggatctctactatcgcctgaacgtggtggcgattgaagtaccgtcgctgcgtcagcggcgggaagatattcctctgctggctgaccattttcttcagcgctttgccgagcgtaatcgcaaggcggtaaaaggttttacgccccaggcgatggatctgctgattcactacgactggccgggaaatattcgtgaactggaaaacgcggtggaacgggcggtggtgctgctgaccggggaatatatttccgaacgcgagctgccgctggcgattgcgagtacgccgatcccgctggtacaaagtcaggatattcagccgctggtggaagtcgaaaaagaggtgattcttgcggcactggagaaaacgggcggcaacaaaaccgaagccgcccgtcagttagggatcacgcgcaaaacgctgttggcaaaactgtcgcgttag

SEQ ID NO: 156999 - protein, 441 aa, Escherichia coli UMN026
MTHDNIDILVVDDDISHCTILQALLRGWGYNVALANSGRQALEQVREQVFDLVLCDVRMAEMDGIATLKEIKALNPAIPVLIMTAYSSVETAVEALKTGALDYLIKPLDFDNLQATLEKALAHTHSVDAETPAVSASQFGMVGKSPAMQHLLSEIALVAPSEATVLIHGDSGTGKELVARAIHASSARSEKPLVTLNCAALNESLLESELFGHEKGAFTGADKRREGRFVEADGGTLFLDEIGDISPMMQVRLLRAIQEREVQRVGSNQTISVDVRLIAATHRDLAAEVNAGRFRQDLYYRLNVVAIEVPSLRQRREDIPLLADHFLQRFAERNRKAVKGFTPQAMDLLIHYDWPGNIRELENAVERAVVLLTGEYISERELPLAIASTPIPLVQSQDIQPLVEVEKEVILAALEKTGGNKTEAARQLGITRKTLLAKLSR

SEQ ID NO: 157000 - DNA, 1353 bp, Agrobacterium radiobacter K84
  CDS (1)..(1353): transl_table=11
atgacggatgcattgccgggcgtattgctgatcgaggatgatgccgcgctgcggcgctcgctcgcccaatggctgtcgctcaacgaactctcggtgacagaggccgctgacggcaatgaagcgctcaaggttcttcgctcggatacgatcgatgtcgtgatttcggacgtacgaatgcctggtatctccggcctggagctgcttgccgtcatcagaaaaacctggccggagctgccggtgatcatcctgagcggtcatggagacgttcccatggcggttgccgccattcaggcaggggcgttcaattttctgacgaagccctacgtgccggagcagttgatcggcacgcttcagaatgcgcttgaacagacccgcctgcgccggcgggtcgtctctttggaacagagcaacgcaatccaggcaaggctcgagcggcaattgctgggcgccgatcaggcgaccacccgcctgaagtccaccatcgagcagcttgctccctatcacgtcgacgtgctgatcaagggcgaaaccggttcgggcaaggaggtcgtggctcggctgctgcacgagtgcagcccgcgtcaggctggtccctttgtggcaatcaattgtgccgcattgccgctcgatattgtcgaaagtgagctgtttggtcacgagaccggggcatttaccggcgcttcgggcatccgcatcggcaagttcgaattcgcgaaaggcggtacgatcttcctggatgagatcgaaagcatgccgctttccatacaggcgaaactcctgcgcgccctccaggagcgcacggtcacccgccttggctcgaaccgggacataccaatcgacatacggatcctgtccgcgaccaaggaggatcttcgcgatctcgcctcgcggggcctttttcgcgaggatctctattatcggctggcggcggcggatatcgctattcctcccttacgggatcgcggtcacgatgcgctgctgctgtttgagcatttcatgttgtctatggcggaacgcctcgagcggaaggcgttgtctttgacggatgaggagacgcgcttccttcttgcctatgcgtggcccggcaatgtgcgggagctcaagcacctggcagagcgccgtgcgctggggctggattggcgccccgacacggatcagcaggacgatctgacggttgagaattcctccctggccgatcttgtcgatcagttcgagctcaacctcatcgaacaggctttgaggaatgccgacggcaggaccagccttgccgcggaacggctgcagcttccccacagaacgctgaatgagaagttgaaaagactgagcacgaagaacagaagcgaccgagcgtga

SEQ ID NO: 157001 - protein, 450 aa, Agrobacterium radiobacter K84
MTDALPGVLLIEDDAALRRSLAQWLSLNELSVTEAADGNEALKVLRSDTIDVVISDVRMPGISGLELLAVIRKTWPELPVIILSGHGDVPMAVAAIQAGAFNFLTKPYVPEQLIGTLQNALEQTRLRRRVVSLEQSNAIQARLERQLLGADQATTRLKSTIEQLAPYHVDVLIKGETGSGKEVVARLLHECSPRQAGPFVAINCAALPLDIVESELFGHETGAFTGASGIRIGKFEFAKGGTIFLDEIESMPLSIQAKLLRALQERTVTRLGSNRDIPIDIRILSATKEDLRDLASRGLFREDLYYRLAAADIAIPPLRDRGHDALLLFEHFMLSMAERLERKALSLTDEETRFLLAYAWPGNVRELKHLAERRALGLDWRPDTDQQDDLTVENSSLADLVDQFELNLIEQALRNADGRTSLAAERLQLPHRTLNEKLKRLSTKNRSDRA

SEQ ID NO: 157002 - DNA, 1431 bp, Desulfovibrio vulgaris str. Hildenborough
  CDS (1)..(1431): transl_table=11
atggcaaacaggcagagggtgcttctcgtcgatgacgagcaggatttcgccaacgggctggctcgcctcatagcccgtctttttccagacgtgcacgtggatgtcgccttctccggtcaggacgcgctggagcatatccgcaagcagcgcgtccacgtcatggtgaccgacctgcgtatgccgggtatgggcggcatggaactgctcaggcgggtcatggagacggaacccgatgtgagcgtcgtggtgctcaccgcccacggcaccatcgagaccgcggtggaagcgttgcaggccggggcctacgatttcgtgaccaagcccgtcgagcctgaacaggtggcgcgcgtccttcgcaagggacttgagagggcacgcctgctcgacgagaacaggcgcttgcgcgacctcgtggcactggtgggcgaatccggtgaactggtgggcgagagccccgccatgcagtctgtacgccgcaccgtcgccacggttgccccttccgactacaccgtgctcattcgtggcgagtcgggtaccggcaaggagatggtcgcgcggatggtacatcgtttaagtccgcgtgttgacgaaccctttcttgccctcaattgtccggccattcccgaacatctgcttgagagcgagctcttcggtcacgtccggggagcattcacaggcgcggaaagggatcgcaagggcctgttctccattgccgacggtggcactgtcctgcttgatgaaatcggtgacatctcatcgaacatccagacaaaactgctgcgcttcctgcaagagggagaggtgcgccccgtggggtcgccccgcaatgagcacgtggacgtccgcatcatcgcctccaccaatcaggaccttgaagcccgcatggcgtcgcgcgactttcgcgaagacctcttctaccgcctcaatgtcgtcaccatctgggttccgccgttgcgtgaacggctttcagacatccctctgcttgcggcgacgttcctcgcccgtgcaagtcgggaactcggtgtaccgcagcgtgacttcgatgaaggcgtcctcgaccatctcatgcggcgcgaatggccgggcaacgtgcgtgaattgcagaactacgtgcgcaggctcgccctgttcagccggggggatggcatcacgcttgatgccgtgcaacaggccgaacagagcgagagcggagcccctgccgccctctgtgtgccgtctcccgtggcggagggagaggtgatgccctacaaggatgccaaggcatcgctggtcgagtcgttcagtgagaggtacctgcgcgaccttctggagagtacggggggcaatgtcaccgaggctgccagactttcggggctgtcgcgcgtgtccatccagaagatggtcgcccgttacggtatcgatgccgcagccatgcgtgccaacggcagttga

SEQ ID NO: 157003 - protein, 476 aa, Desulfovibrio vulgaris str. Hildenborough
MANRQRVLLVDDEQDFANGLARLIARLFPDVHVDVAFSGQDALEHIRKQRVHVMVTDLRMPGMGGMELLRRVMETEPDVSVVVLTAHGTIETAVEALQAGAYDFVTKPVEPEQVARVLRKGLERARLLDENRRLRDLVALVGESGELVGESPAMQSVRRTVATVAPSDYTVLIRGESGTGKEMVARMVHRLSPRVDEPFLALNCPAIPEHLLESELFGHVRGAFTGAERDRKGLFSIADGGTVLLDEIGDISSNIQTKLLRFLQEGEVRPVGSPRNEHVDVRIIASTNQDLEARMASRDFREDLFYRLNVVTIWVPPLRERLSDIPLLAATFLARASRELGVPQRDFDEGVLDHLMRREWPGNVRELQNYVRRLALFSRGDGITLDAVQQAEQSESGAPAALCVPSPVAEGEVMPYKDAKASLVESFSERYLRDLLESTGGNVTEAARLSGLSRVSIQKMVARYGIDAAAMRANGS

SEQ ID NO: 157004 - DNA, 1338 bp, Pectobacterium atrosepticum SCRI1043
  CDS (1)..(1338): transl_table=11
atgacagccagaaaaacggcgagtttgttgctcgtggatgatgaccctagcctgctaaaactgttgggaatgcgtctgaccagcgagggattcagtgtgatgacggcggagagcggccaagaggcactgcgtctgttaacgcgtgagaaattcgatctggtgatcagcgatcttcgtatggacgaaatggatggcatggcgctgttttccgaaatccagcgttatcagccggggatgccggtgatcattctaaccgctcacggttctattcccgatgcggttgcggctacgcagcaaggggtattcagcttcctcacgaagcctgttgaccgtgatgcgctctacaaagcgatagatgaagcgatggcgctgtccgcgccggcaggtgatgaaagctggcgtgaaactatcgtaacgcgcagcccaattatgctgcgtctgctggagcaggcccgaatggtcgcacagtcggacgtcagcgtgctgattaatggccagagcggaaccgggaaagaggtgctggctcaggcgattcatgcggcaagcccgcgagcgaaaaaagcctttatcgcgattaactgcggtgcgctgccggagccactgttggagtcggaactgttcggtcatgcgaaaggggcttttactggtgctgtcagcagccgtgaagggctttttcaggcagcagaaggtggtacgctgtttttagatgaaatcggcgatatgccgctgtctttacaggttaagctgttgcgcgttttgcaggagcgaaaagtccgtccgctggggagtaaccgcgatctggacattgatgtgcggattatttccgccacgcaccgtgatttaccgaaggcgatggaaaaaaacgaattccgcgaggatttgtattatcggctcaacgtggtgaatatgaagctgccagcgctgcatgaacgcgctgaagatatcccgatgctggcaaaccatctgctgcgcgaatcagccaatcgtcacaagccttttgtgcgcaccttttcaaccgatgcgatgaagcgtttgatgacggcgagctggccgggtaacgtgcgccaactggtgaatgtcatcgaacaatgtgtggcgctgaccagcgcaccagtgatcagtggcgcgttagttgaacaggcgctagaaggtgaaaataccgcgttgccgacgtttgttgaagcgcgtcatcagtttgagcttaactatttgcgaaaattattacagatcgcaaaaggtaacgtgacgcaggctgcacgaatggctgggcgtaatcgaacggagttttataaactgctgggccgccacgagttggatgccaacgattttaaagactag

SEQ ID NO: 157005 - protein, 445 aa, Pectobacterium atrosepticum SCRI1043
MTARKTASLLLVDDDPSLLKLLGMRLTSEGFSVMTAESGQEALRLLTREKFDLVISDLRMDEMDGMALFSEIQRYQPGMPVIILTAHGSIPDAVAATQQGVFSFLTKPVDRDALYKAIDEAMALSAPAGDESWRETIVTRSPIMLRLLEQARMVAQSDVSVLINGQSGTGKEVLAQAIHAASPRAKKAFIAINCGALPEPLLESELFGHAKGAFTGAVSSREGLFQAAEGGTLFLDEIGDMPLSLQVKLLRVLQERKVRPLGSNRDLDIDVRIISATHRDLPKAMEKNEFREDLYYRLNVVNMKLPALHERAEDIPMLANHLLRESANRHKPFVRTFSTDAMKRLMTASWPGNVRQLVNVIEQCVALTSAPVISGALVEQALEGENTALPTFVEARHQFELNYLRKLLQIAKGNVTQAARMAGRNRTEFYKLLGRHELDANDFKD

SEQ ID NO: 157006 - DNA, 1383 bp, Methylococcus capsulatus str. Bath
  CDS (1)..(1383): transl_table=11
atgagtgaagcgcgcaagcgagtgttgctggtggacgacgatcccgacctgttgcgtctgatcgggctgcgcctgaccgcggcggggttcgatgtggcgaaagcggcgaacggccagtcggcactgtcgcaggtagtggtcttccggccccatgtcgtcgtcaccgatctgaggatggacggtatggacggcatggcattgttcgacgccttgaacgaacgccatcccaccttgccagtgatcatcatgacggcacacggtaccatcaacgacgcagtcgcggcgacccggcggggcgtattcggattcgtcaccaagccggtggacaagaacgaactgattgagcacatctccgaagcgatccgcatcaacggaaacacgaccgtcattcccgacaaggaggagtggcgcgcccggatcgtcacccagagccctttgatggaagaggtcctggggcaggcccagcgtgtggcccagaaccgggccagcgtgttcatcggtggtgaaagcggtaccggcaaggaactgctggctcgggccattcacgacctcagtcctcgtgccaaggggccgttcgtggcggtcaattgcagcgccatcccggaaaatctgctcgagtccgagctgttcggttaccgcaagggggcgttcaccggggcgacgcgggaccaccagggcctgttcaaagcggccgacggtggcacgctgttcctggatgaagtcggtgacatgccacgatcctttcaggtgaaactgttgcgcgcccttcaggagatgaaggtgcgtcccgtcggagcgacccatgacgagccggtcgacgtccgggtgatctcggccacccatgtcgaccttgaacaggcgatggcggaggggaacttccgcgaggatctgtattaccgcctcaacgtcgtgaccctgctgttgccgcccctggtcaaacgtcccgaggacattcccttgctggccatgcattttcttcgggagctggtgagttcgtacggcgaccaggtcaagggcttctctccggaggcgatggaggcgctggtgaattttcagtggcccggcaacgtccggcaactgcgcaacgtggtggaacagtgcgtggcgctgtcgaccacgccactgatccccgtgaccctggtgcaacgtgctttgcgggaggcgccgtcgtctttcccttcgttgcaggaagccagggaccagttcgaactcaactacctcatccgcctattgcagatgacccgagggaacgtgacccaggccgcccgtctggctaagcgcaaccgtaccgagttttaccggctcctgagccggcatggcatgaatccggcgatgttcaagggaggcggagatgccgccggcgatgcgcagccgccttcgtga

SEQ ID NO: 157007 - protein, 460 aa, Methylococcus capsulatus str. Bath
MSEARKRVLLVDDDPDLLRLIGLRLTAAGFDVAKAANGQSALSQVVVFRPHVVVTDLRMDGMDGMALFDALNERHPTLPVIIMTAHGTINDAVAATRRGVFGFVTKPVDKNELIEHISEAIRINGNTTVIPDKEEWRARIVTQSPLMEEVLGQAQRVAQNRASVFIGGESGTGKELLARAIHDLSPRAKGPFVAVNCSAIPENLLESELFGYRKGAFTGATRDHQGLFKAADGGTLFLDEVGDMPRSFQVKLLRALQEMKVRPVGATHDEPVDVRVISATHVDLEQAMAEGNFREDLYYRLNVVTLLLPPLVKRPEDIPLLAMHFLRELVSSYGDQVKGFSPEAMEALVNFQWPGNVRQLRNVVEQCVALSTTPLIPVTLVQRALREAPSSFPSLQEARDQFELNYLIRLLQMTRGNVTQAARLAKRNRTEFYRLLSRHGMNPAMFKGGGDAAGDAQPPS

SEQ ID NO: 157008 - DNA, 1314 bp, Legionella pneumophila str. Lens
  CDS (1)..(1314): transl_table=11
atgagtcatgttttaatagttgaagatgattcagtattaagagaagcgttggctgagactatgacgatctcaggccatacctatatcactgctaaagatggtaaagaagcattagcacttcttgaattacataatccaagtgtcgtactcactgacataagaatggataaattagatggaaatcagttattaaatgaaatacaaaaaaagaggccaggtttgccggttattctaatgacagcttatggttctgtagaggatgcggttacagcgattcgcaatggggctgttgattatttgcaaaagcctttcagcgcgcaagtcttaattgaaaaaataaagcagtatataaaaactgatctgagtgaagaggataatgatcctattgcacgggatcctaaaagccaagccttactgacaatggctttgagagttgcacaatccgatgtgggagtaatgatcagtggagaaagcggtactggaaaggaagtgctcgcacattttatccatgatcattcttatcgaagcaaacaaccttttattgcaattaattgtgctgcaattcctgaacaaatgctggaagcaaccctgtttggttatgaaaaaggtgcttttaccggagcatacaaatcgacccctggcaagtttgagcaagcccagggcggaactttacttttagatgaagtgagtgaaatgtccttaggtttgcaggcaaaattacttagagttttacaggaaaaagaagtagaaaggattggttcaaacaaaataataaaccttgatgtgcgcattattgcgacgacaaacaggcatttaaaggaagaggttcaggcagggcgttttagagaggatctttactatcggttgaatgtttttcctctgcaatggcacccgctaagagagagaacaagtgatattattccattagcgaattatttaatccgtaagcattgtcagcataagcaaccaatagttccagtcattagcccagatgctcaaaaggcaatgttgtcttattcatggccagggaatgcgagagagctggataatgttatacaaagagctctggtgctacagactcaaggtatcatcgaagaagagcatttgcagattacgaattcaactaccatgccttcagaagagaagacaaagggtacgagtaaaaatttacagatacatgaatatgaattaatagaaaaaacattattagaaaatgaaggaaacagacaaaaagttgctgcgttattgggggttagcgaaaggactttgcgttataaactcgcaaaaatgcgtgaagaagggtatgtggtttaa

SEQ ID NO: 157009 - protein, 437 aa, Legionella pneumophila str. Lens
MSHVLIVEDDSVLREALAETMTISGHTYITAKDGKEALALLELHNPSVVLTDIRMDKLDGNQLLNEIQKKRPGLPVILMTAYGSVEDAVTAIRNGAVDYLQKPFSAQVLIEKIKQYIKTDLSEEDNDPIARDPKSQALLTMALRVAQSDVGVMISGESGTGKEVLAHFIHDHSYRSKQPFIAINCAAIPEQMLEATLFGYEKGAFTGAYKSTPGKFEQAQGGTLLLDEVSEMSLGLQAKLLRVLQEKEVERIGSNKIINLDVRIIATTNRHLKEEVQAGRFREDLYYRLNVFPLQWHPLRERTSDIIPLANYLIRKHCQHKQPIVPVISPDAQKAMLSYSWPGNARELDNVIQRALVLQTQGIIEEEHLQITNSTTMPSEEKTKGTSKNLQIHEYELIEKTLLENEGNRQKVAALLGVSERTLRYKLAKMREEGYVV

SEQ ID NO: 157010 - DNA, 1404 bp, Aromatoleum aromaticum EbN1
  CDS (1)..(1404): transl_table=11
atgaaagccactcacagtcccgcccccactgccggcgcccacctgctgctcgtcgatgacgacaccgacctgctcaagctgctgtcgctgcgcctgcacgcgagcggttatcgcgtcagcaccgccgagacggcggaggctgcgctcggacgcatcgcagtcgaacgcttcagcctggtcgtcagcgacgtgcgcctcccggaccgcgacggactcgcgctgttcgaggaaatccggcgtacctgccctgtgctgccggtgatcctgctcaccgcgcacggcagcattcccgacgccgtcgaggcgacttcccgcggcgtcttcggctatctgacaaaacctttcgacagtcaggcgctgcttgaaaagatctcccaggcgttgcaggtaggcggcccgatacacgtcgggaacgacgccgacgacggggactggcgtgatgaaatcatcagccacagcaaccgcatggcgaccgtcctcgacgaagcccgtctcgtcgccgcgtcggacgcgagcattctcatccgcggcgacagcggcaccggcaaggaattgctcgcgcgcgcaatccaccgcatcagcagccgcgcgaacgcgccgttcgtcgcgatcaactgtggcgcaattccggaacagttgctcgaatcggaactcttcggccacgtgaaaggcgctttcaccggcgcggcgacggccaacaccgggcttttccttaccgcccatcgcggcacggtgtttctcgacgagatcggcgacatgccgctcgcgctgcaggtgaagctgctgcgcgtgctgcaggagcgcgccgtgcgccccgtcggggcgagtcgcgccgagccgatcgacgtgcggatcatctccgcgacgcaccgcgacctggaactcgcgcttgccgaggggcagttccgcgaggatctgttctaccgcctcaacgtcgtcagcctgaccttgccgacgctcgaccagcgccgcgaagacatcccgctgctcgccaaccatttcctcgaggttatcgggcgcaaataccacaaacggctgcgcggtttcgcccccgaagcgatggaagcactcgcgacggcggcttggccggggaatatccgccagctgcagaacgtcgtcgaacaggcctgcgcgctcgcgacgacgtcactgatcccgctcgcgttggtcgaacgggcgctgcgggtgccgagcatcgaagccctgagttacgccgaagcaaagcaacgcttcgaacgcaactacctcatccagctgctcaaactcaccgacggcaatgtttcggacgcagcgcgcctcgcggaccgcaaccgtacggagttctatcgcctgctgcaacggcatgcgctgactcccagtctgttccgcgacggttcggttgtcgctcgcgaacgacagcaataa

SEQ ID NO: 157011 - protein, 467 aa, Aromatoleum aromaticum EbN1
MKATHSPAPTAGAHLLLVDDDTDLLKLLSLRLHASGYRVSTAETAEAALGRIAVERFSLVVSDVRLPDRDGLALFEEIRRTCPVLPVILLTAHGSIPDAVEATSRGVFGYLTKPFDSQALLEKISQALQVGGPIHVGNDADDGDWRDEIISHSNRMATVLDEARLVAASDASILIRGDSGTGKELLARAIHRISSRANAPFVAINCGAIPEQLLESELFGHVKGAFTGAATANTGLFLTAHRGTVFLDEIGDMPLALQVKLLRVLQERAVRPVGASRAEPIDVRIISATHRDLELALAEGQFREDLFYRLNVVSLTLPTLDQRREDIPLLANHFLEVIGRKYHKRLRGFAPEAMEALATAAWPGNIRQLQNVVEQACALATTSLIPLALVERALRVPSIEALSYAEAKQRFERNYLIQLLKLTDGNVSDAARLADRNRTEFYRLLQRHALTPSLFRDGSVVARERQQ

SEQ ID NO: 157012 - DNA, 1398 bp, Pseudomonas fluorescens Pf-5
  CDS (1)..(1398): transl_table=11
atgacgcataacctgctggtggtcgatgacgagccgaaactctgcgacctgctgtcctcggccctgagccagaacggcatccaggtattcaccgcaggcaacggcctgcacgcgctcaaggtgctggagcaggaagacatcgacctggtgatcagcgactggcgcatgcccggcatggacgggccgcagttgctgggggaaatcaagcagcgctacccgcagttgccggtgatcgtgatgaccgcctacagcacggtgaagaatgccgtgcagtccatgcgcaacggcgcctacgactacatcgccaaacccttcgacatcgacgaactggacatcaccgtcagcaaggccctgcagtttcgcgacatcctcaaagacaaccagcgcatgcgcgccgagctcgcagagcatcagcagatcgacagcctggtgggcgacagcccggccttccgtcgggtgctgcaagccgtggattcggtgcgcgaaagcaacgccaccatcctcctgaccggggaaagcggcaccggcaaggaaatggtcgcccgggccatccacaagcacggcaaccgggccgacaagccctttgtcgcggtcaattgtgcggccattcccgagggtctgctggaaagcgagatgttcggccaccgcaagggcgccttcaccggcgccgtggcggaccgggtcggacgtttccagcaagccgacaagggcaccctgttcctcgacgaagtcggcgacatgcccctggccctgcaggccaagatcctgcgtgccctgcaggagcgagtgatcgagccggtgggcgatccgcgggagcgcaaggtggatgtgcgggtgatcgccgccaccaacaagaacctgctggaagcggtggccaacaaggaatttcgcgaagacctgtactaccgcctgaatgtattcccgatccccttgccggcactgcgcgaacgggtcgaggacatcgccctgctggcccggcactttgcccacagcctgggtgccaccgccggcaagcgcatcagcggcttcagccccgaagccctgcaggccatggccagctacgcctggccggggaatatccgcgaactgcagaactgcgtggagcgggccaccatcgtcgccaccggccaggtcatcgaagaaaaggacctgccagggtatctgttcggcccccaggcgcagggcacagagagcagcgcagccatcagtgtcggcccgcaagtgcccagcgacctggaagcggccctggcggaagtggaaaaagcctacattctcgccgccctgcagcagagcaacggtgtccaggcggcagcggcgcagttgatcggtatttccgagcgcagcttctggtaccggctgaagaaactcggcatccaggtggacaagatcgttcgctga

SEQ ID NO: 157013 - protein, 465 aa, Pseudomonas fluorescens Pf-5
MTHNLLVVDDEPKLCDLLSSALSQNGIQVFTAGNGLHALKVLEQEDIDLVISDWRMPGMDGPQLLGEIKQRYPQLPVIVMTAYSTVKNAVQSMRNGAYDYIAKPFDIDELDITVSKALQFRDILKDNQRMRAELAEHQQIDSLVGDSPAFRRVLQAVDSVRESNATILLTGESGTGKEMVARAIHKHGNRADKPFVAVNCAAIPEGLLESEMFGHRKGAFTGAVADRVGRFQQADKGTLFLDEVGDMPLALQAKILRALQERVIEPVGDPRERKVDVRVIAATNKNLLEAVANKEFREDLYYRLNVFPIPLPALRERVEDIALLARHFAHSLGATAGKRISGFSPEALQAMASYAWPGNIRELQNCVERATIVATGQVIEEKDLPGYLFGPQAQGTESSAAISVGPQVPSDLEAALAEVEKAYILAALQQSNGVQAAAAQLIGISERSFWYRLKKLGIQVDKIVR

SEQ ID NO: 157014 - DNA, 1350 bp, Thiobacillus denitrificans ATCC 25259
  CDS (1)..(1350): transl_table=11
atgaagaagctgaccatcctcgtcgtcgacgatgacgccgcgctgcgcgagctgatcacgctgcggctcgaagcgaacgggtttcgcgtggtcgccgtcgacagcggcgaggccgcgctcgcgcagctcgcgctggcgcggccggacgccgtgctgaccgacctgcagatggccggcatggacggcatggcgctgttccgcgcgatacaggcgcgcgatcctgcgctgcccgtcgtcgtgctgaccgcgcacggaaccattcccgacgcggtcgcggcgacccagcaagggctgttcggctatctgaccaagccctacgacgcgccgacgctgatcgaactcctgaagcgcgcgacccgcctgggcgtaagcgccgcggaggtcgcggacgactggcgcgccgaaatcatcaccgccagcccggcgatggaagccttgctggccgaggcgcggctcgccgcgcagagcgaagcctcgctgctgatccagggcgaatccggcaccggcaaggagttgctcgcgcgggccatccaccgcgccagcccgcgccgcgccaagccattcgtcgcgatcaactgcggcgcgatcccggccgaactgctcgaatccgagctcttcggccacctcaagggcgccttcacgggcgcggcgcgcgacaatccgggcctcttcatgagcgcgcagggcggcacggtgtttctcgacgagatcggcgacatgccgctgccgctgcaggtcaagctcctgcgcgtcctgcaggaaggcgaggtgcgtccggtgggggcgaccgagacgcgcccggtcgacgtgcgcatcctctcggcgacacacaggaacctcgaggatgccatcggcagcggcgaattccgcgaggacctctactaccgtctcaacgtcgtcaacctcatgctgccgccgctgcgcgagcggcgcgaggacattccgctgctggcgcagcatttcctcgccgagctgaccgagaaatacgaccgtcgtgtacgcggcttcgcccccgacgcgctcgacatgctggccgccgccgattggccgggcaacatccgccagctgcgcaacgtgctcgaacagtgcgtcgccctctgtacgacgccgacgatccccggcagcctcgtcgcgcgcgcactgcgcgagaaaccggcggagattcagccgctcgccgaagcccgcgccgccttcgagcgcgactatctcatctccctgctcaagctcacgcgcggccaggtcagcgaagtcgcgcggctcgccggacgcaaccgcaccgaggtctaccggctgctgcagcgtcacggcctgacgcccgcgctgttcaaggatcgcgacgacgcgccctga

SEQ ID NO: 157015 - protein, 449 aa, Thiobacillus denitrificans ATCC 25259
MKKLTILVVDDDAALRELITLRLEANGFRVVAVDSGEAALAQLALARPDAVLTDLQMAGMDGMALFRAIQARDPALPVVVLTAHGTIPDAVAATQQGLFGYLTKPYDAPTLIELLKRATRLGVSAAEVADDWRAEIITASPAMEALLAEARLAAQSEASLLIQGESGTGKELLARAIHRASPRRAKPFVAINCGAIPAELLESELFGHLKGAFTGAARDNPGLFMSAQGGTVFLDEIGDMPLPLQVKLLRVLQEGEVRPVGATETRPVDVRILSATHRNLEDAIGSGEFREDLYYRLNVVNLMLPPLRERREDIPLLAQHFLAELTEKYDRRVRGFAPDALDMLAAADWPGNIRQLRNVLEQCVALCTTPTIPGSLVARALREKPAEIQPLAEARAAFERDYLISLLKLTRGQVSEVARLAGRNRTEVYRLLQRHGLTPALFKDRDDAP

SEQ ID NO: 157016 - DNA, 1350 bp, Pseudoalteromonas haloplanktis TAC125
  CDS (1)..(1350): transl_table=11
atgccagcaataaaaccgcaaggtgcaaaagtattattagtggatgacgatgccagcttattaaaattgctcgctattcgtatcgaatcaaaaggctacgaggttaccacctgcgagagcggcctaattgcgttacaaatattaaaaagccaagtgttcgatgccgtagtaaccgacctgcgcatggacgaaatggatggcatggcactgcaccgccaattgcaaagccgctatccggcattgcccgttattatgatgacagcgcatggctctattcctgatgcggtagaggctaccaaacaaggcatttttgcatttattaccaaaccaatagataaagacgagttattcgacagcttagcaaaagcgatagaaatacacggcgtaaatgccgatgaaataatacccactagcaatatagttactcgtagcggcgctatgctacatttgctagagcaagttaaactgctagggccaacgcaagttaacgtattaatatcgggagccagtggtacgggtaaagagttattagctcaagctattcatcagcatagccatgtaagtaaaggcccatttgtagcgataaactgcggcgcagtaccgggtgaactgctagagtcagaattatttggtcataaaaaaggctcgtttactggggcaataaaagatcaccaaggactgtttcaacaagctgagggaggcaccttatttttagatgaaataggtgatatgccgcttaatttacaagttaagttactgcgcgtattgcaagaaaaaaccatacgtccagtcggctttcaagaagaaatagccatagatgttcgcattgtatcggcaactcataaaaacctccccgaagcgattataaatcagcagtttagggaggatttatactaccgcttaaacgtggttaatttaaaactccctcctttgtgcgagcgtcgcgaagatataagtctacttgcacaatactttagcgccagtattgcaaagcgaatgaagcaaagcgaaaaacactttgccaacgacgccatgcacgcactcgtgcgttacgactggccaggtaatattcgccaacttcaaaacgtggtagagcaagttgtagcacttaccccaagcgaagttatttcagagcatttagtgctaagtgcattaaatagcaacgaaaaaaatgtagagccattgtcgctaaacgacgctaaaaaagaatttgaacgcgactacgtaataaacacccttaaaatggctggtggaaatgtcgccgaaggcgcaaaactagctaaacgtaaccgttcagatttttataaactgattaaaaagcacaatatagatgttgataatttagcttaa

SEQ ID NO: 157017 - protein, 449 aa, Pseudoalteromonas haloplanktis TAC125
MPAIKPQGAKVLLVDDDASLLKLLAIRIESKGYEVTTCESGLIALQILKSQVFDAVVTDLRMDEMDGMALHRQLQSRYPALPVIMMTAHGSIPDAVEATKQGIFAFITKPIDKDELFDSLAKAIEIHGVNADEIIPTSNIVTRSGAMLHLLEQVKLLGPTQVNVLISGASGTGKELLAQAIHQHSHVSKGPFVAINCGAVPGELLESELFGHKKGSFTGAIKDHQGLFQQAEGGTLFLDEIGDMPLNLQVKLLRVLQEKTIRPVGFQEEIAIDVRIVSATHKNLPEAIINQQFREDLYYRLNVVNLKLPPLCERREDISLLAQYFSASIAKRMKQSEKHFANDAMHALVRYDWPGNIRQLQNVVEQVVALTPSEVISEHLVLSALNSNEKNVEPLSLNDAKKEFERDYVINTLKMAGGNVAEGAKLAKRNRSDFYKLIKKHNIDVDNLA

SEQ ID NO: 157018 - DNA, 1356 bp, Pelobacter carbinolicus DSM 2380
  CDS (1)..(1356): transl_table=11
atggaagagaaaaaacagcgcctgttgttggtagatgacgacaccgatctgttgcggctattgtccattcgcctgcgcggtgccggatacgaggtcaacatcgcggaaagcggcgaggaagccctggccaagattccggccgtgcgcccccatctggtgattaccgatctacgcatggcgggcatggatggcatggcgttgttcgacgccattcgcacccgccagggttccttgccggttatcattctgacggcccatggctccatccccgatgccgtcgaagcgacccgtcggggggtgttcagctttctcaccaagcctttggacagtaaggccctgctggaggagattcagcgtgcgttgcgcatagccggcggttccgccgaacaggaatcttcggaggggatgtcctggcgcagcgaaatcattaccaaaagcccgacgatggaagatctgctggccaaggcgcggctggctgccgagagtgatgccgcggttttgatccgcggagagagcggcaccggcaaggaattgattgcgcgtgccattcatcgggccagcgcccgcgccgacaaaccctttgtcgccgtcaactgcggcgccatacccgatacgctgctcgaatcggaactgttcggccataccaaaggggcttttaccggtgccatgaaggattaccccggtctgttccgttccgccgaagggggcaccctgtttctcgacgaaatcggggatatgcctctgccgttgcaggtcaagttgttgcgcgtcctgcaggagaagcagatgcggccggtcggctcggtcgctacctgtgccgtcgatgtgcggatcatttccgccacgcatcgccatctcgaagaggagatcagtgccgaccggtttcgcgaggatctttattatcgcctcaatgtcgtctccctcgacttgccgagcctggccgagcgacgtgaagatatccccttgctggccaaccattttttgcagaaattcgccgcgcggagcggtaaaaaagttaccgggtttgcacccgaggccatggaagccctgttgtcggcgtcctggccgggcaatgtgcgccagctgatcaacgtggtcgagcagggattggccctgaccacgacctccctgatttcggcttcgctggttgcggatgccattcacgaaaatatcgaaagcattccccccttcagcgaggcgcgacgccagttcgagcaggactacctggtgcgcctgatgcagcttacccgtggcaatgtcgcccatgccgcgcggctggccggccgcaaccgtacggaattctataaattgctcggtcgccaccacatcgtgccgagtctgtttaaaaatgtctaa

SEQ ID NO: 157019 - protein, 451 aa, Pelobacter carbinolicus DSM 2380
MEEKKQRLLLVDDDTDLLRLLSIRLRGAGYEVNIAESGEEALAKIPAVRPHLVITDLRMAGMDGMALFDAIRTRQGSLPVIILTAHGSIPDAVEATRRGVFSFLTKPLDSKALLEEIQRALRIAGGSAEQESSEGMSWRSEIITKSPTMEDLLAKARLAAESDAAVLIRGESGTGKELIARAIHRASARADKPFVAVNCGAIPDTLLESELFGHTKGAFTGAMKDYPGLFRSAEGGTLFLDEIGDMPLPLQVKLLRVLQEKQMRPVGSVATCAVDVRIISATHRHLEEEISADRFREDLYYRLNVVSLDLPSLAERREDIPLLANHFLQKFAARSGKKVTGFAPEAMEALLSASWPGNVRQLINVVEQGLALTTTSLISASLVADAIHENIESIPPFSEARRQFEQDYLVRLMQLTRGNVAHAARLAGRNRTEFYKLLGRHHIVPSLFKNV

SEQ ID NO: 157020 - DNA, 1371 bp, Thiomicrospira crunogena XCL-2
  CDS (1)..(1371): transl_table=11
atgaccgccagcccagataaatcggcagcgacatttgaaggccagaaaattttattggtcgacgacgacaccagtctgttaaaactgctgtcaattcgtctacgctcattcgggctgacggttgaaacggtggaaggtgcggccgaagcgcttgccaaattacccacgtttcaaccgcatttggttctgaccgacttgcgtatgtcggaaatggatggcttagcattgtatgaacaaattcatcaacaatcgccgaccttgcccgtcattatcatgactgcgcacggtacaatcaaagaagccgttgaagcgacgagcttaggggtttttggatttatcaccaagccgattaaccatgccgaactcacccaaaaaattcaacaggcactgaccgtgcatcacccagtgatggcgaccgaaaagcaagccaaatggcggcataacattattggtcagagccaggtcatggaagcgttgttgcaggatttgtatcatgttgctcaaagcgatatcagtgtttacatccaaggtgaaagtggaacgggtaaggaactgattgcacaagccattcatgcggccagccctcgacacaaaaaaccgttcattgctgttaactgcagtgcgattcccgaggacttattagagtcggaattatttggtcataaacgaggtgctttctccggtgccgttgaaaaccgaaaaggcttgtttgaactggccgatggcggtgttttgtttttggatgaaatcggcgatatgtcaccggcctttcaggtgaagttacttcgagcgttgcaggaaaacgaaattcgtccagtcggtgccgataaaaccgtttcaattgatgtcagagtggtgtcggccagtcataaagatctgaagcaactggtggaagaaaaagcatttcgtctggatttatattatcggttgaacattgtgaccttaaagctgccgacgttaaaacaacgacctgaagacattcccttgttggccagctactttatttcgcaacaacgcggtaaggccaaaaaattatcaaacgaagccatggagctgttattaggttatgactggccgggaaatattcgtgagttaaaaaatgtcattgagcaggtgtgtacctttgcaacagcaccactgattcctgcgagcttaattgaaaaagccttgcaacaagaaaacttaaccatggtgtcgttgcaagaagccaagttaaattttgagcgtgattacctcattcgggtgctgaagctggtcggcgggaatgtctctcatgcggcacgcattgcacaacgaaatcgcaccgagttttatcgcctgctggatcgtcatcaactgaaacccgcagagttcaaacaaaaatcacaataa

SEQ ID NO: 157021 - protein, 456 aa, Thiomicrospira crunogena XCL-2
MTASPDKSAATFEGQKILLVDDDTSLLKLLSIRLRSFGLTVETVEGAAEALAKLPTFQPHLVLTDLRMSEMDGLALYEQIHQQSPTLPVIIMTAHGTIKEAVEATSLGVFGFITKPINHAELTQKIQQALTVHHPVMATEKQAKWRHNIIGQSQVMEALLQDLYHVAQSDISVYIQGESGTGKELIAQAIHAASPRHKKPFIAVNCSAIPEDLLESELFGHKRGAFSGAVENRKGLFELADGGVLFLDEIGDMSPAFQVKLLRALQENEIRPVGADKTVSIDVRVVSASHKDLKQLVEEKAFRLDLYYRLNIVTLKLPTLKQRPEDIPLLASYFISQQRGKAKKLSNEAMELLLGYDWPGNIRELKNVIEQVCTFATAPLIPASLIEKALQQENLTMVSLQEAKLNFERDYLIRVLKLVGGNVSHAARIAQRNRTEFYRLLDRHQLKPAEFKQKSQ

SEQ ID NO: 157022 - DNA, 1335 bp, Shigella dysenteriae Sd197
  CDS (1)..(1335): transl_table=11
atgagccataaacctgcgcatttattattggtcgatgacgatccgggattgctgaaactgcttggcctgcgcctgaccagcgaaggctacagcgtggtcacggcggaaagtggcgctgaaggattacgggtactgaatcgcgaaaaagtagatttagtcatcagcgacctgcggatggatgaaatggacggtatgcagctgtttgctgaaatccagaaagtgcagccgggaatgccggtaattattcttaccgcgcatggttctattcccgatgccgttgctgcaacacagcagggcgtttttagtttcctcaccaagcctgttgataaagacgcgctatatcaggcaattgatgatgcgctggaacaatccgcgccagccaccgacgaacgctggcgcgaggcgattgtcacccgcagcccgctgatgctgcgtttgctggaacaggcgcggctggtggcgcaatcagacgttagcgttttgattaacggtcagagcggcaccgggaaagagattttcgcccaggctatccacaacgccagcccgcgcaatagcaaaccatttattgctattaactgtggcgcattgcccgagcaattgctggagtcggagctgtttggtcatgcgcgtggcgcgtttactggcgctgtcagcaatcgcgaaggtttattccaggcggcggaaggcggtacgctatttctcgatgagattggcgatatgcccgcaccgttgcaggtcaaactgctgcgcgtgttgcaggagcgtaaagtgcgcccgctgggcagtaaccgcgatattgatatcgacgtgcggattatttccgccactcaccgcgacctgccaaaagcgatggcgcgcggggaattccgcgaagatctctattaccgcctcaacgttgtcagcctgaaaattccggcactggcggagcgcacagaagacattccgctactggcaaatcacctgttgcgccaggcggcagagcgacataaaccgtttgtccgcgcgttctctaccgatgcgatgaaacgcctgataactgcgagctggccgggtaatgtgcgccagttggtcaacgtgattgaacagtgcgtggcgctgacctcatccccggtgattagtgatgcattagtagagcaggcgctggagggcgaaaatacggcgctgccaacctttgttgaggcacgtaatcagtttgaactcaactatttgtgtaagctgctgcaaattaccaaaggcaacgtcacccacgcggcgagaatggcggggcgaaaccggacagaattttataaactgctttcccgacacgagctggatgcaaacgatttcaaggaatga

SEQ ID NO: 157023 - protein, 444 aa, Shigella dysenteriae Sd197
MSHKPAHLLLVDDDPGLLKLLGLRLTSEGYSVVTAESGAEGLRVLNREKVDLVISDLRMDEMDGMQLFAEIQKVQPGMPVIILTAHGSIPDAVAATQQGVFSFLTKPVDKDALYQAIDDALEQSAPATDERWREAIVTRSPLMLRLLEQARLVAQSDVSVLINGQSGTGKEIFAQAIHNASPRNSKPFIAINCGALPEQLLESELFGHARGAFTGAVSNREGLFQAAEGGTLFLDEIGDMPAPLQVKLLRVLQERKVRPLGSNRDIDIDVRIISATHRDLPKAMARGEFREDLYYRLNVVSLKIPALAERTEDIPLLANHLLRQAAERHKPFVRAFSTDAMKRLITASWPGNVRQLVNVIEQCVALTSSPVISDALVEQALEGENTALPTFVEARNQFELNYLCKLLQITKGNVTHAARMAGRNRTEFYKLLSRHELDANDFKE

SEQ ID NO: 157024 - DNA, 1362 bp, Nitrosospira multiformis ATCC 25196
  CDS (1)..(1362): transl_table=11
atgtccgatgcaaaacccagaattctgatcgttgacgacgacaccgatctgcttgagctgctgaccatgcgccttacagcggcgggatacaaagtggacgccgttccaagcgcagaggcggcgctgaactatctggacgtgtcccgtccgcaactggtcatcagcgatatgcagatgagcggcatggacggcatggcattatttgaacaaatccatcgctccttgccgaccttgccggtgatcatactcacggcgcacggaacgatccccgatgccgtcacggctgtccagcgaggggtattcggctatcttgccaaaccttttgacagcaagacgttgctggcaaatatcagtcaggcgctcaagttcgttccgggcgccgtatcgcagaaggaactgtcgcaggcaccgtggcgcaagaatatcatcactcagagcgccgtcatggaggatcttcttacccgggcgggactggttgcggaaggtgacgccagcgtgctgatctatggagaaagcggagtgggcaaggagctgttcgcgcatgccatacatgatgcatccaaacgatccgatcatccgttcgtggcgatcaattgcgccgccattccggaacagttgctggaatccgagctgttcgggcatgtcaaaggggcatttaccggggctgtcagggatcacaagggtttattccagctggccgaggggggcactctctttctcgacgaaatcggcgatatgccggttttgcttcaggtcaagctgttgcgtgttctccaggaaaggcaggttcgaccggttgggtcggcacaatcgattccggtggatgtgcgtattatttcggctactcaccgcgatctgaaaacggaaatcgctgctggaacatttcgggaagacctgtattacagactggacgtggtgtcccttaccatcccggttctggcgcaaaggcgcgaagatattcctttactggtaaattacttcctcagcacattttcagagaaataccagaaaaatatcaatggcttctctcccgaggccatggaaacactggttgccgcgtcctggcccggcaatgtgcgccaactcatgaacgtcgtcgagagatgcgttgcattgagtactgcgccccttatttcgcccgtgctggtctacgatgcgatgcaccgggaagaagagcaactcgtgtctttcgaggatgcccgcagaagttttgaacgggattatctggtgcgcgtacttaaaatcaccggaggaaacgtcacccaggcagcccgcctcgccaagcgcaaccgcacggagttctacaagctgctgcagcgataccagctcgatccatctgtcttcaagcaggcgcaggtttga

SEQ ID NO: 157025 - protein, 453 aa, Nitrosospira multiformis ATCC 25196
MSDAKPRILIVDDDTDLLELLTMRLTAAGYKVDAVPSAEAALNYLDVSRPQLVISDMQMSGMDGMALFEQIHRSLPTLPVIILTAHGTIPDAVTAVQRGVFGYLAKPFDSKTLLANISQALKFVPGAVSQKELSQAPWRKNIITQSAVMEDLLTRAGLVAEGDASVLIYGESGVGKELFAHAIHDASKRSDHPFVAINCAAIPEQLLESELFGHVKGAFTGAVRDHKGLFQLAEGGTLFLDEIGDMPVLLQVKLLRVLQERQVRPVGSAQSIPVDVRIISATHRDLKTEIAAGTFREDLYYRLDVVSLTIPVLAQRREDIPLLVNYFLSTFSEKYQKNINGFSPEAMETLVAASWPGNVRQLMNVVERCVALSTAPLISPVLVYDAMHREEEQLVSFEDARRSFERDYLVRVLKITGGNVTQAARLAKRNRTEFYKLLQRYQLDPSVFKQAQV

SEQ ID NO: 157026 - DNA, 1362 bp, Hahella chejuensis KCTC 2396
  CDS (1)..(1362): transl_table=11
atgaacgatcccatcgccagcaacaacgatattcttgtcgtcgatgacgactccgggttattgcaactgatgtccatgcgtctgaaagcgctgggatacgcctcccggttggtggaaagcggcgaggaggcgttgcgggagattcgccgtaagcaaccgattctggtgatatccgacctgaaaatggacggcatggatggcattcaattgctggagcatatccaaagggactggcccggcaccccggtaatcatgctaaccgcccacggctcgatttcagaggcggtggtcgccacccaaaaaggcgcattcgcttttctcaccaaaccggtggaccgcgaagaactgcgcacaacgatcgaaaaagccctggttggacactccgccaacgaaagcgccgccaatgtatttcaatccattgttactcgcagcgccaagctctatcagctactggagcaggcgaaaatggtggcgcaaagcgacgtcaatgtattgattcaaggggaaagcggcaccggtaaagaggtgctggcgcaggcaatccatgacgccagtccgcgtcgggacaagcctttcatcccgatcaactgcggcgccatacctgatgaattgatggaatccgaactgttcggtcataaaaaaggttccttcaccggcgccgttcgcgatcatgtgggactgtttgaaaccgccgacggcggcaccgtattccttgatgagattggcgacatgcccatgcatctgcaggtcaagctgctacgagtgctgcaagagcgcaaaattaaacctatcggctccaccacctatatcgatgtagacattcgcatcttatccgccacccacaaagacctgctcaacatgatcgaagagcagacattccgcgaggacctgtactaccggctcaatgtagtcaatttggtgctgccgcctctgcgcgaacgccgtgaggatatcccgctgctgctgagccattttctggagcgcgtggcccaacgctacggccaaagctgcaagcgcattgcgccggacgccctggacgccctgatttcttattcctggccgggcaacatccgcgaattgatcaaccttagcgagaaatgtcacgctctcaatgccggcgccgtgatttcccgccaattgatagaacaggcgctgccccggttccaacgggaacagaatcaggagatgacgctttccgaggcgaaacgcatctttgagaaagagtacgtggaaaaactactgagcatgaccaatggcaacatcccggaagccgcccggatggcggaccgtaatcgctcagacttctacaaaatcgtgaaaaagcacagtattgaccccgaactgtataaagttggtcaataa

SEQ ID NO: 157027 - protein, 453 aa, Hahella chejuensis KCTC 2396
MNDPIASNNDILVVDDDSGLLQLMSMRLKALGYASRLVESGEEALREIRRKQPILVISDLKMDGMDGIQLLEHIQRDWPGTPVIMLTAHGSISEAVVATQKGAFAFLTKPVDREELRTTIEKALVGHSANESAANVFQSIVTRSAKLYQLLEQAKMVAQSDVNVLIQGESGTGKEVLAQAIHDASPRRDKPFIPINCGAIPDELMESELFGHKKGSFTGAVRDHVGLFETADGGTVFLDEIGDMPMHLQVKLLRVLQERKIKPIGSTTYIDVDIRILSATHKDLLNMIEEQTFREDLYYRLNVVNLVLPPLRERREDIPLLLSHFLERVAQRYGQSCKRIAPDALDALISYSWPGNIRELINLSEKCHALNAGAVISRQLIEQALPRFQREQNQEMTLSEAKRIFEKEYVEKLLSMTNGNIPEAARMADRNRSDFYKIVKKHSIDPELYKVGQ

SEQ ID NO: 157028 - DNA, 1341 bp, Hahella chejuensis KCTC 2396
  CDS (1)..(1341): transl_table=11
atgaaaaatcccgccaaaccaagaatcctgttagttgacgacgatagcagtctgctgcgtttgctatcgatccgactggagtctgcgggctatgacgtgtatgcggttgaatccgccacggaagcgctgaagcaactgcagcaaaataaattcaatctactgatcacagatctgcgcatggatgaaatcgacggcatcggcctgttcgaacgcgtgcaggccatcaacgccagcctgccagtgataatcatcaccgcgcacggcaccatccccgaggcggtctccgccacgcaaaaaggggtgttcggttttctgcccaaaccgatagaaaaggaacagctgctcaacaccattgaagcggcgctgtcgcaaacgcagcatcacatgtccgaatcctggtgcgaagaaatcatcagcaccagcagccgcatgcagcagttgcttggccaagccaaaatggcggcgcaaaccaacgtcaacatcctcattaccggtcccagcggcactggtaaagagttgctggccagagcggttcacaaggccagcccccgcgccaacaaaccctttgtcaccatcaactgcggcgccttgccggaacagttattggaatcagaattattcggccacaccaagggcgctttcactggcgctgtcaaagattatcccgggctattccggtccgcctcaggaggtacgctgtttctggatgagatcggcgacatgccgctgtctcttcaagtgaaactgttgcgcgccattcaggaaaaacagattcgctctctgggttccgtggaaaacgaggcggtggatgtgcgcatcttatcggcgacgcatcgtgacctggaaaaagccatggaggagaacgagttccgcgaggacctgtactatcgtctgaatgtggtcaatttcgcgctccctcccctggaagagcgtgcggaagatattcccgccctggtgaagcacatcctgtccacacgcaaagatcaacgtaacggattcgtgaaaggcattgccccggaagccatggcgttgctttgcgaagcgaaatggcccggtaacatacgccagttggtgaatgttgtggaacagacgattgcgctgaccaccaatcccatcatcagcgcagcgatggttaaacaggcgctggccaatcgtgcgccggaactgccttctttcaacgaagcgcgggcgaccttcgagcgtggttatctcaccaaagtgctgtcaattacggaaggaagcgtcagtcaggcggccaggctggcccagaggaacagaacggatttctacaaactattggctaagtatgaaatagacccggccgccttcaagaacagctaa

SEQ ID NO: 157029 - protein, 446 aa, Hahella chejuensis KCTC 2396
MKNPAKPRILLVDDDSSLLRLLSIRLESAGYDVYAVESATEALKQLQQNKFNLLITDLRMDEIDGIGLFERVQAINASLPVIIITAHGTIPEAVSATQKGVFGFLPKPIEKEQLLNTIEAALSQTQHHMSESWCEEIISTSSRMQQLLGQAKMAAQTNVNILITGPSGTGKELLARAVHKASPRANKPFVTINCGALPEQLLESELFGHTKGAFTGAVKDYPGLFRSASGGTLFLDEIGDMPLSLQVKLLRAIQEKQIRSLGSVENEAVDVRILSATHRDLEKAMEENEFREDLYYRLNVVNFALPPLEERAEDIPALVKHILSTRKDQRNGFVKGIAPEAMALLCEAKWPGNIRQLVNVVEQTIALTTNPIISAAMVKQALANRAPELPSFNEARATFERGYLTKVLSITEGSVSQAARLAQRNRTDFYKLLAKYEIDPAAFKNS

SEQ ID NO: 157030 - DNA, 1347 bp, Anaeromyxobacter dehalogenans 2CP-C
  CDS (1)..(1347): transl_table=11
atgtcccggctgctgctggtcgatgacgagcccgccgtgctctacgcgctgaaggagctggcgcgctcgaacggccacgagccggtcaccgcgcgctccggcgccgaggcgctcgagcgcctcgagggcgtggacgccgtggtcacggactacgccatgccggagatggacggcctgcagctgctgcaggccatccacgagcgcgacgcctcgctcccggtggtggtcctcaccgcccagggctcggagcgcgtggcggtgcgcgccatgaaggccggcgcgtacgagtacgtcaccaagccgttcgacatcgacgagatgacgctggtgctggaccgggcgctcgagacgcgcacgctccgcgtccagaaccggcgcctggccgtcgagaaggcgctcggccggagcatcgtgggcgacgcgccggccatgcagcggctcctcgacgcggtggcgcgcgtcgcgcccaaggacgtcacggtgctggtgcgcggcgagaccggcaccggcaaggagctggtcgcgtcgctgctccacgcgcagagccgccgcgcgtcgggcccgctggtccgcttcaactgcgcggccatcccggccgagctggccgaggcggagctgttcgggcacgcgcgcggcgccttcaccggcgcggtccaggcgcgcgaggggttcttcgcgcaggccgacggcgggacgctggtgctggacgaggtgggcgagctgccgctgccgctccaggccaagctgctccgcgcgctgcaggagggcgagatccagccggtgggcgccggccgcgtcgagcgcgtggacgtgcgcgtcgtcgcggccacgcaccgcgacctcgccgaggaggcgcgcgcgggccggttccgcgaggacctgtactaccggctcgcggtggtggagctggtggtcccgccgctccgcgagcaccgcgaggacatcccggcgctggcgaaggagttcgcccggcgcttcgccgcgcgcttcggcgtggacgacgtccggctctcgccgccgctgctcgagcggctggccgcggcggagtggcccggcaacgtgcggcagctcgagaaccaggtggcgaggctggtggcgttgagcaacgggggcgagctcggcccggaggcgctggaggcgggggccgccccggccgcgcgcgagccgggcgtggagccgccgccggagggcgcgctcacgctgcacgagcacctcgacgcggtcgagcgcaacatcatcgcgaagacgctggccgcgaccggcggcaaccagtccgagacggcgcgccgcctcggggtgagccgcggcgcgctcatcgaccggctgaagaagtacggcttcgcctag

SEQ ID NO: 157031 - protein, 448 aa, Anaeromyxobacter dehalogenans 2CP-C
MSRLLLVDDEPAVLYALKELARSNGHEPVTARSGAEALERLEGVDAVVTDYAMPEMDGLQLLQAIHERDASLPVVVLTAQGSERVAVRAMKAGAYEYVTKPFDIDEMTLVLDRALETRTLRVQNRRLAVEKALGRSIVGDAPAMQRLLDAVARVAPKDVTVLVRGETGTGKELVASLLHAQSRRASGPLVRFNCAAIPAELAEAELFGHARGAFTGAVQAREGFFAQADGGTLVLDEVGELPLPLQAKLLRALQEGEIQPVGAGRVERVDVRVVAATHRDLAEEARAGRFREDLYYRLAVVELVVPPLREHREDIPALAKEFARRFAARFGVDDVRLSPPLLERLAAAEWPGNVRQLENQVARLVALSNGGELGPEALEAGAAPAAREPGVEPPPEGALTLHEHLDAVERNIIAKTLAATGGNQSETARRLGVSRGALIDRLKKYGFA

SEQ ID NO: 157032 - DNA, 1434 bp, Rhodoferax ferrireducens T118
  CDS (1)..(1434): transl_table=11
atgagcgatttgcctgacgaccccgtcacgccgcccgcagcggcgcttcgtgcacccgggccccatttgctggtggttgacgatgacgccgacatgctgcgcctgctgaccatccggctcacggcggcgggctaccgcgtgacggcggtcacctcggccgaggccgccatgacccagctgcatatcgagcggccgcaactggtgctcagtgacgtgcgcctgccgggccgcgacggcctggcgctgtttgacgacattcgcgcgcagcatccctcgttgccggttattttgctgaccgcccatggcacgattcccgatgcggtccaggccaccgagcgcggcgtcttctcctacctgaccaagccctttgatggcaagagcctgctcgacaagattgcgcaggcgctgtcgctgagcgccccggcccattcagtcaagcccggcagcccgcaggcgtggcaaaaccagatcgtcagccgctccagccgcatggccgaggtgctcgcggaagcgcacatggtggcgcaatcggacgccagtgtgctgctgcgcggcgaaagcggcaccggcaaggaactgctggcccgggcgattcaccaggccggctcgcgcgccggtaaaccgttcatcgcggtgaactgcggcgccattccggagcccttgctggagtcggaactgtttggccatgtcaagggagccttcaccggcgccgtggcgaatcacatcgggctgtttcaggcggccgacggcggcaccctgctgctcgacgagatcggcgacatgccgcccgcgctgcaggtcaagctgctgcgggtgctgcaggagcgcatggtgcggcccttgggctcaagccagtccattcccgtggatgtgcgcatcatctcagccacgcaccgcgacctcgacctggcgatggccgagggccaattccgtgccgacctgtactaccggctcaatgttgtcaccttgagcttgccgccgctgtccgagcggcgcgaggacatcgcgctgctggccaactattttttggtcaaattggccgacaaatacaaaaaacgcctgagcggatttgcgcccgaggccctgattgccttgaccacggccgcctggccgggcaatgtgcgccagctctacaacgtcgtggagcaggtctgcgccctgtcgacctcgccgctggtgccgctggccctggttcagcgcgccctgcgctcgcccagcgtggaggtgctgaccctggccgaggcccggcaacgctttgagcgcgactacctggtgggactgctcaagctcactgacggcaatgtggccgacgccgcccgtctggccgaccgcaaccggaccgagttttaccgcctgatgcaaaagcacggcctgacgcccgggctgttcaaggccgacagcaacgggccggcctcgccccctgctgcgagctga

SEQ ID NO: 157033 - protein, 477 aa, Rhodoferax ferrireducens T118
MSDLPDDPVTPPAAALRAPGPHLLVVDDDADMLRLLTIRLTAAGYRVTAVTSAEAAMTQLHIERPQLVLSDVRLPGRDGLALFDDIRAQHPSLPVILLTAHGTIPDAVQATERGVFSYLTKPFDGKSLLDKIAQALSLSAPAHSVKPGSPQAWQNQIVSRSSRMAEVLAEAHMVAQSDASVLLRGESGTGKELLARAIHQAGSRAGKPFIAVNCGAIPEPLLESELFGHVKGAFTGAVANHIGLFQAADGGTLLLDEIGDMPPALQVKLLRVLQERMVRPLGSSQSIPVDVRIISATHRDLDLAMAEGQFRADLYYRLNVVTLSLPPLSERREDIALLANYFLVKLADKYKKRLSGFAPEALIALTTAAWPGNVRQLYNVVEQVCALSTSPLVPLALVQRALRSPSVEVLTLAEARQRFERDYLVGLLKLTDGNVADAARLADRNRTEFYRLMQKHGLTPGLFKADSNGPASPPAAS

SEQ ID NO: 157034 - DNA, 1374 bp, Escherichia coli UTI89
  CDS (1)..(1374): transl_table=11
atgaaaagcccgcgccatccaccgatgaggtcactcctgatgagccataaacctgcgcatttattactggtcgatgatgatccgggattgctgaaactgcttggcctgcgcctgaccagcgaaggctacagcgtggtcacggcggaaagtggcgttgaaggattacgggtactgaatcgcgaaaaagtagatttagtcatcagcgacctgcggatggatgaaatggatggtatgcagctatttgctgaaattcagaaagtgcagccgggaatgccagtaattattcttaccgcgcatggttctattcctgatgccgttgctgcaacacagcagggcgtgttcagttttctcaccaagcctgtcgataaagatgcgctatatcaggcaattgacgatgcgctggaacaatccgcgccagccaccgacgaacgttggcgcgaggcgattgtcacccgcagcccgctgatgctgcgcttgctggaacaggcgcggctggtggcacaatcagacgttagcgttttgattaacggccagagcggcaccgggaaagagattttcgcccaggctatccacaacgccagcccgcgcaacagcaagccatttattgctattaactgtggcgcattacccgagcaattgctggagtcggagctgtttggtcatgcacgtggcgcgtttactggcgctgtcagcaatcgcgaaggtttattccaggcggcggaaggcggtacgctatttctcgatgagattggcgatatgcccgcatcgttgcaggtcaaactgctgcgcgtgttgcaggagcgtaaagtgcgcccgctgggcagtaaccgcgatattgatatcgacgtgcggattatttctgcgacccaccgcgacctgccaaaagcgatgacgcgcggggaattccgtgaagacctctattaccgcctcaacgttgtcagcctgaaaattccggcactggcggagcgcacagaagacattccgctactggcaaatcacctgttgcgccaggcggcagagcgacataaaccgtttgtccgcgcgttctccaccgatgcaatgaaacgcctgatgactgcgagctggccgggcaacgtgcgccagttggtcaacgtgattgaacagtgcgtggcgctgacatcatctccggtaattagtgatgcgctggtggagcaggcgctggagggcgaaaacacggcgctgccaacctttgttgaggcgcgtaatcagtttgaactcaactatttgcgtaagctgctgcaaatcaccaaaggcaacgtcacccacgcggcgagaatggcggggcgcaaccggacagaattttataaactgctttcccgacacgaactggatgcaaacgatttcaaggaatga

SEQ ID NO: 157035 - protein, 457 aa, Escherichia coli UTI89
MKSPRHPPMRSLLMSHKPAHLLLVDDDPGLLKLLGLRLTSEGYSVVTAESGVEGLRVLNREKVDLVISDLRMDEMDGMQLFAEIQKVQPGMPVIILTAHGSIPDAVAATQQGVFSFLTKPVDKDALYQAIDDALEQSAPATDERWREAIVTRSPLMLRLLEQARLVAQSDVSVLINGQSGTGKEIFAQAIHNASPRNSKPFIAINCGALPEQLLESELFGHARGAFTGAVSNREGLFQAAEGGTLFLDEIGDMPASLQVKLLRVLQERKVRPLGSNRDIDIDVRIISATHRDLPKAMTRGEFREDLYYRLNVVSLKIPALAERTEDIPLLANHLLRQAAERHKPFVRAFSTDAMKRLMTASWPGNVRQLVNVIEQCVALTSSPVISDALVEQALEGENTALPTFVEARNQFELNYLRKLLQITKGNVTHAARMAGRNRTEFYKLLSRHELDANDFKE

SEQ ID NO: 157036 - DNA, 1371 bp, Methylobacillus flagellatus KT
  CDS (1)..(1371): transl_table=11
atgataggaacaaccaagaaaatcctgactgtcgatgatgatcccgacatcctcaaactcatgggaatgaggctgcaggcagcaggttaccaagtcatcactgccaccaatgcagaagaggcgctgtcccaaattgccatcagccgaccaagcctggtgattacagacttacgcatgcctggcatggatggcttggccctgttcgatgccatccatcaatccgatcctgccttgcccgtgatcatggttacagcccacggctcgatccctgaagcggtcgatgcgacacaacgcggcgtattcggcttcctcactaagccttttgacagcaagtcactgctgcagcaggtagaggccgcattacgcatcggcacaggcgatctgcagcctcatgaccaggatatcgacaatgaatggcgcaagagcatcattacacgcagtccgcaaatggaaaacttgctcgggcaagccaagctcatggcagtttccgatgccagcgtatttatccaaggtgaaagcgggacgggcaaggagttgctggcacgcgccatccatcaggccagtcctcgccgggacaagccttttatcgccatcaattgcggtgccattccagaagccctgcttgagtctgaactattcggtcatagcaaaggggcattcaccggcgccttgcgcgatcacaaagggctgttccagacggctgacggcggcaccctgttcctggacgaaatcggcgacatgccgctgccattgcaggtaaaactgcttagagccctgcaggagcgcgccatccgtcccgtcgggtccaataccagcatcaacattgatgtgcgtgtgatttctgcgactcaccgcaacctggcagaggagatgaaagccggacggttccgcgaagacctgtactatcgcatcaatgttgtcggacttgaaattcctcccctggctgcacgtcgtgaagatatttccctattggccaataactttctcaacgaactggccaccaagtaccgtaaaaaactcaacggctttgcccccgaagccttggagctgttgatcactgcgccatggcctggcaacgtccgccagttgcagaatatcgtcgaacaaaccgtagtgctctgcaccacacccttaatcccggccactttggtacaaaaagcattgcaagaaaacatcggcggcattgtaccgtttgaagttgcacggaagaattttgagcgcgactacctgatcaagctgctcaaggccacgaatggaggcgttacacaagctgcccgcctggcgcaacgcaatcgcaccgagttttacaagctattgcaacgccaccagctcacgccggcgttgttcaagaacgacaataccgcacattaa

SEQ ID NO: 157037 - protein, 456 aa, Methylobacillus flagellatus KT
MIGTTKKILTVDDDPDILKLMGMRLQAAGYQVITATNAEEALSQIAISRPSLVITDLRMPGMDGLALFDAIHQSDPALPVIMVTAHGSIPEAVDATQRGVFGFLTKPFDSKSLLQQVEAALRIGTGDLQPHDQDIDNEWRKSIITRSPQMENLLGQAKLMAVSDASVFIQGESGTGKELLARAIHQASPRRDKPFIAINCGAIPEALLESELFGHSKGAFTGALRDHKGLFQTADGGTLFLDEIGDMPLPLQVKLLRALQERAIRPVGSNTSINIDVRVISATHRNLAEEMKAGRFREDLYYRINVVGLEIPPLAARREDISLLANNFLNELATKYRKKLNGFAPEALELLITAPWPGNVRQLQNIVEQTVVLCTTPLIPATLVQKALQENIGGIVPFEVARKNFERDYLIKLLKATNGGVTQAARLAQRNRTEFYKLLQRHQLTPALFKNDNTAH

SEQ ID NO: 157038 - DNA, 1401 bp, Polaromonas sp. JS666
  CDS (1)..(1401): transl_table=11
atgagtgactcctcgacgagttccgccgcgacggcgaccccgtcggcccatctgctggtcgttgacgacgacccggacatgctgcgcctgctgacgatacggctcaccgcggcgggttaccgcgtgacggcggtcacctctgcagaggctgccatgacccagctccatatcgagcggccgcagctggtgctgagcgacgtgcagcttcccggccgggatggcctggccctgtttgacgacatccgcgcccggcatccgtcgctgccggtgatcctgctgacggcgcatggcaccattcccgatgcggtggaggcgaccgagcgaggtgtcttcacctacctgaccaaaccttttgatggcaagggcctgctcgacaagatcgcccaggcgctggcgctgagcgcgccttcgcatccggccaagcggggcagccccgaggcatggcaacaccagatcatcagccgctccagccgcatggccgaagcgctggcggaagcgcgcatgatctcgcaatcggatgccagtgtgctgctgcgcggtgaaagcggcaccggcaaggaactgctggcccaggccatccaccaggccagcccgcgcgccggcaaaccctttattgccgtcaactgcggcgccatccccgaggccctgctggagtcggaactgttcggccacgtcaagggcgccttcaccgacgcggtggccagtcacaagggcttgttccaggcggccgatggcggcaccttgttgcttgacgagattggcgacatgccgccggccctccaggtcaagctgctgcgcgtgctgcaggagcgggtggtgcggcccctgggctcaagccagtccatcccggtggacgtgcgcatcatctcggccacgcaccgcgacctggacgccgccatggccgagggccagttccgcgccgatctgtattaccgcctcaatgtggtgacgctgacgctgccgccgctgtcggagcgccgcgaagacattcccttgctggccaaccatttcctcatcaagctggccaacaagtacgacaagcgcctgagcggcttcgccccggaagccatcaaggccctgaccacggccgcctggccaggcaatgtgcgacagctctacaacgtggtggagcaggtctgtgcgctgtcgacgacgccgctcgtgccactggccctggtgcagcgcgccctgcgctcgcccagtgtgcaggtacttacttttgcagaggccaggcaacgttttgagcgcgactacctggtcggcctgctcaaactgaccgatggcaatgtggccgacgccgcgcgcctggccgaccgtaaccgcaccgagttttaccgcctgatgcaaaaacacggcctgacccccgggcatttcaaggccgacaacgccaccgctgcctga

SEQ ID NO: 157039 - protein, 466 aa, Polaromonas sp. JS666
MSDSSTSSAATATPSAHLLVVDDDPDMLRLLTIRLTAAGYRVTAVTSAEAAMTQLHIERPQLVLSDVQLPGRDGLALFDDIRARHPSLPVILLTAHGTIPDAVEATERGVFTYLTKPFDGKGLLDKIAQALALSAPSHPAKRGSPEAWQHQIISRSSRMAEALAEARMISQSDASVLLRGESGTGKELLAQAIHQASPRAGKPFIAVNCGAIPEALLESELFGHVKGAFTDAVASHKGLFQAADGGTLLLDEIGDMPPALQVKLLRVLQERVVRPLGSSQSIPVDVRIISATHRDLDAAMAEGQFRADLYYRLNVVTLTLPPLSERREDIPLLANHFLIKLANKYDKRLSGFAPEAIKALTTAAWPGNVRQLYNVVEQVCALSTTPLVPLALVQRALRSPSVQVLTFAEARQRFERDYLVGLLKLTDGNVADAARLADRNRTEFYRLMQKHGLTPGHFKADNATAA

SEQ ID NO: 157040 - DNA, 1401 bp, Chromohalobacter salexigens DSM 3043
  CDS (1)..(1401): transl_table=11
atgaagcacgccgccgcgcatattctgctggtcgatgacgaccccagcctgctcaagttgctgggcatgcgcctggaaagccgaggctaccgcgtgaccaccgccgagagtggacgccaggcactggactgcctgaccgaggaccgccccgacctggtgctctccgacctgcgcatggacgaaatggacggcatggcactgtttcacgaattgcagcgccgcgcgccgggcatgccggtgatcattctcaccgcgcacggctccatcccggatgcggtgagcgccacgcgccagggggtgttcagctttctcaccaagccggtggaccgcgacgagctgttcgccgccatcgaggaagccatggcgcagacggcgagcacccacggggccggcgacgatgcctggcgtgccgagatcatcacccgcagcccgcagatggaacgcatcctcgagcaggcccgcatggtggcggcttcggatgtcagcgtgctgatcaccggggcctccggctcgggcaaggagctgctggccaacgccatccaccaggcgagcggacgcgccgacaagcccttcgtggcgatcaactgcggcgcgctgcccgagcagttgctggaaagcgagctgttcgggcacgccaagggcgccttcaccggtgcggtgagccagcacgaggggctgttcctcgccgccaacggcggcagcctgttcctcgacgagatcggcgacatgccgctgacgctgcaggtcaaattgttgcgcgcgctgcaggaacgtcagattcgccccctgggctcgaccacttcggtgcccatcgacgtgcgcatcatctccgccacgcaccgcgacctcgaccgcgccatgcacgagggcgacttccgtgaggacctttattaccgcctcaacgtcgtcaacctcaagctgccggccctcaaggagcgtgccgaggacgtgccgttgctggccaagtatctggtgggacaggcggcagagcgccacaagcccttcgtcaagggcttctcgtcggaggcgctcaacctgctggcctccagcgcctggccgggcaacgtgcgccagctggtcaacgtggtcgagcagtgcgtggcgctgaccagctcgccgatcatccccgaggccctggtggcccaggcgctggcggccgaggaaaacgcgctgccctcgttcaacgaggcgcgcgcgggcttcgaacgcagctatctcgtcaaggtgctgaagatcaccgagggcaacgttacccaggccgcgcgcatcgccgggcgcaaccgcaccgacttctacaagctgctggcgcgccacgacctggaaccgagcagcttcaagccgagcacccactcgcagtcggcacagaacgacgacgccgcaccacgccgcgcccagcgctga

SEQ ID NO: 157041 - protein, 466 aa, Chromohalobacter salexigens DSM 3043
MKHAAAHILLVDDDPSLLKLLGMRLESRGYRVTTAESGRQALDCLTEDRPDLVLSDLRMDEMDGMALFHELQRRAPGMPVIILTAHGSIPDAVSATRQGVFSFLTKPVDRDELFAAIEEAMAQTASTHGAGDDAWRAEIITRSPQMERILEQARMVAASDVSVLITGASGSGKELLANAIHQASGRADKPFVAINCGALPEQLLESELFGHAKGAFTGAVSQHEGLFLAANGGSLFLDEIGDMPLTLQVKLLRALQERQIRPLGSTTSVPIDVRIISATHRDLDRAMHEGDFREDLYYRLNVVNLKLPALKERAEDVPLLAKYLVGQAAERHKPFVKGFSSEALNLLASSAWPGNVRQLVNVVEQCVALTSSPIIPEALVAQALAAEENALPSFNEARAGFERSYLVKVLKITEGNVTQAARIAGRNRTDFYKLLARHDLEPSSFKPSTHSQSAQNDDAAPRRAQR

SEQ ID NO: 157042 - DNA, 1401 bp, Myxococcus xanthus DK 1622
  CDS (1)..(1401): transl_table=11
atgacggacagaccgagtgttctcgttgtcgacgacaaggagaacatgcgccacctcatcacccgcattctcggtgacgcttatcaggtgaggacggctgaagacggaggccgtgcgctctccctcatccagacgcagccgttcgacgtggtggtgacggacatccgaatgccaggagcggacggcttcgaggtgctcaaggccgtcaagcagcacgcgcccaccaccgaggtcatcctgatgacggcgtacgcctccgtccccaaggcggtagaggccatcaaggagggggcctacgactacctgcccaagcccttcgacccggacgaggcgtccctggtggtagcccgcgccgtcgagcgcaagcggctcaaggagcaggccgcctcactgcggcgcgagctggagggcatctacagcttccagaacatcattggcaggagcgcgcccatgcgtgcgctctacggcctgctggagcgcgcctcccagttggacatcacggtgctcatcaccggggagacggggacgggcaaggagttggtggcgcgggccatccaccacgacggcccacgcaaggaccggcccttcattgcggtcaactgcggcgcgctgccctccgaactcatcgagagcgagctgttcggtcacgcccggggcgccttcactggcgcggtagagaccaaggccggtctcttcgaggcagcctccgggggaaccatcttcctggacgagattggagagttgcccctgtccgttcaggtgaagctcaaccgcacgctccaggacaaggaagtgcgccgtgtcggagacgcggttgcgcgctgcatcgacgcacgcgtcatcaccgccacccaccgcgacctcaaggccgaagtgactgcgggccgcttccgcgaagacctctactaccggctcaatgtcttcccggtgcatctgccgtccctgcgggagcggcgcgaggacatccccctgctggccatgcacttcgtacagaaggcggcgaagacctaccggcagccggtggatggcctggagccggacgcgttgcgtgcgctcaccgggtacacctggccgggcaacgtgcgccaactagagaatgccatcgaacgcgcggtggccatcaccactggctcccgagtgggccctgacgcactcccccctgaagtcacgggcggacaacagggagcactgcccgtagaccatctggtgaagatgcccttccgggaggcggtggacctggcgcgggaccgtgcatcgcgcgattacctcatcgccctgctgcgggaattcgggggcaatgtgacgcgggctgctgaacgcgcgggcatggagcgcgagagcctccaccggctcctcaagcgctttggcctgcgttccgatgacttcaaggagtcaccctaa

SEQ ID NO: 157043 - protein, 466 aa, Myxococcus xanthus DK 1622
MTDRPSVLVVDDKENMRHLITRILGDAYQVRTAEDGGRALSLIQTQPFDVVVTDIRMPGADGFEVLKAVKQHAPTTEVILMTAYASVPKAVEAIKEGAYDYLPKPFDPDEASLVVARAVERKRLKEQAASLRRELEGIYSFQNIIGRSAPMRALYGLLERASQLDITVLITGETGTGKELVARAIHHDGPRKDRPFIAVNCGALPSELIESELFGHARGAFTGAVETKAGLFEAASGGTIFLDEIGELPLSVQVKLNRTLQDKEVRRVGDAVARCIDARVITATHRDLKAEVTAGRFREDLYYRLNVFPVHLPSLRERREDIPLLAMHFVQKAAKTYRQPVDGLEPDALRALTGYTWPGNVRQLENAIERAVAITTGSRVGPDALPPEVTGGQQGALPVDHLVKMPFREAVDLARDRASRDYLIALLREFGGNVTRAAERAGMERESLHRLLKRFGLRSDDFKESP

SEQ ID NO: 157044 - DNA, 1458 bp, Myxococcus xanthus DK 1622
  CDS (1)..(1458): transl_table=11
atgaaccaagtcaagcgcgccaaagtcctcgtcgtggatgacgactccgtcgtcctcaaggccgtgacgcagattctccagcgcgagggccacccggtggtggccattgacgacgcggtggagggcctggcggccgcgaaggatccgaccatcgacgtggtcgtcctcgacatcaagatgcccaacctgtccggcatggacctgctgcgcggcatcaaggccgaccgcccggacgtggaggtcatcatgatgacggccttcgccaccgtggagacggcggtggaggcggtgaaggcgggggcgtacgactacctcaccaagcccttcgagaacatcgacgaggtcagcctcacggtggccaaggcggccgagcgcaaggcgctcaaggaccgcacccgcgcgctggaggaggccctcacggtccgcagccagttcgaggacctcatcggccagtccacgcagatgcgctccgtcttcaagctggtggagacggtgagccactccaccgccacggtgctcatccagggggagagcggcaccggcaaggagctggtggcccgcgccatccactaccgcagcgcgcgcaaggacaagcccttcgtggcggtcaactgttcggcgctgacggagacgctgctggagagcgagctcttcggccacgtgaagggcagcttcaccggcgccaccggcaacaagaagggcctcttcgaggcggctgacggcggcaccatcttcctggacgaaattggcgacgtgcccccggccacccaggtccgcctgctgcgcgtgctccaggaaggggaagtcaaacgcgtgggcgccaacgagccggtgaaggtggacgtgcgcgtcatcgccgccacccacgtggacctgtcccgcgccaaggagcagggcaagttccgcgaggacctcttctaccgcctcaacgtcatcaccatcgacctgccgcccctgcgtgaccggcccgaggacgtgcccctgctggcgcaccacttcctcaagctctacgcctccaaggcggacaagaaggtgacgggcatctccccgcgcgccatggaagccctcacctgcaaccggtggacgggcaacgtgcgtgagctggagaacgtcatcgagcgcgcggtggtgctgacgggcaacgaggtcatcgacgtggaggacctgccgccgggcttccagtccgcgccgcagccggactccacggtggaggtgttcagcctggcacacctgccgtacgcccaggccaagcgcctggcgatgcgtgccttcgagcgccgctacctgtccgccctgctggagaagaacaaccagaacgtctccagcgccgcgcgcgcggcgggcgtggaccgctccaacttccgtcgtctgctcaagcagtacgaggtggccggccggtccatgaagccccgcgtggtctcccaggacgacggcgaggcgctggaagccgcgtcctga

SEQ ID NO: 157045 - protein, 485 aa, Myxococcus xanthus DK 1622
MNQVKRAKVLVVDDDSVVLKAVTQILQREGHPVVAIDDAVEGLAAAKDPTIDVVVLDIKMPNLSGMDLLRGIKADRPDVEVIMMTAFATVETAVEAVKAGAYDYLTKPFENIDEVSLTVAKAAERKALKDRTRALEEALTVRSQFEDLIGQSTQMRSVFKLVETVSHSTATVLIQGESGTGKELVARAIHYRSARKDKPFVAVNCSALTETLLESELFGHVKGSFTGATGNKKGLFEAADGGTIFLDEIGDVPPATQVRLLRVLQEGEVKRVGANEPVKVDVRVIAATHVDLSRAKEQGKFREDLFYRLNVITIDLPPLRDRPEDVPLLAHHFLKLYASKADKKVTGISPRAMEALTCNRWTGNVRELENVIERAVVLTGNEVIDVEDLPPGFQSAPQPDSTVEVFSLAHLPYAQAKRLAMRAFERRYLSALLEKNNQNVSSAARAAGVDRSNFRRLLKQYEVAGRSMKPRVVSQDDGEALEAAS

SEQ ID NO: 157046 - DNA, 1350 bp, Pseudoalteromonas atlantica T6c
  CDS (1)..(1350): transl_table=11
atgagtaaagttgaagcgtcgttaaagccacaaatattactcgtagatgatgacgaaagtttactacggttaatggctattcgcttagaaggtgaaggctatagtgtgcaaagtgcagaaggcggcaaagaagcgctgcgcttgatgaatacccaaaattttgatgcggtattaagcgaccttagaatgccaggattagatggcttaagtttatttgaagaaattatgtccttgggcaaagacctgccggttattttgatgacagcccacggcacaatccaagatgcggttgaggcgacccaaagaggcgtttttggtttccttaccaagccgattgatcatactgagttgcgtgacctgctagccaaagcggtgagtcaaagccaaggctcgcaaacaagtgcttggcgtgagcaaattatcacgcgttccatgcaaatggagcagttgttggatcaagcccaccgagtggcgcaacgtgacgtcagtgtgttggtcagcggggcaagtggaacgggtaaagagttattggccaatgccattcacaaagccagtaaaagggcgaataaaccgtttgtggcgatcaactgtggtgctttgcctgaaaacctacttgagtctgaacttttcgggcacgccaaaggggcctttactggtgctgtgaatgaacatcaaggcttgtttcgtgaagcagatggtgggacgttgtttttagatgaaattggtgacatgccaacgccgttgcaagttaaattacttcgcgcattgcaagagcaagttattcgtcctgtgggtagcagcaaacaaatacctgttgatgttcgcattatttcggcgactcacaaaaatcttgcaacagaaatgagtgaagggaatttccgtgaggatctgtattatcgtttaaacgttgtgaatttaacgctgccaacgctgcgtgaacgctcagaagatattcccttgctggctcgttacctacttaagaaaagcgccgagcgccatgaagtgcgcgtcagccgtttttctgatgacgccatgcaactgttgaccactgaattgtggccaggcaatgtgcgccagttagtcaatgtggttgagcagtgcgttgcattaacacaaacatcagtgattgcagtgcaccttgtggaacaagcgctgtcgacgtctgagcaaaaatggccaacgctcaccgaagcgcgagatgcttttgaacagagttatctgctaaaactgctcaaaatgaccgacgggaatgttactcgggccgctgaaattgccggtcgtaatcgcaccgatttacacaagttgatgaagaaacatgatttgcactctactgattttaagcatgactaa

SEQ ID NO: 157047 - protein, 449 aa, Pseudoalteromonas atlantica T6c
MSKVEASLKPQILLVDDDESLLRLMAIRLEGEGYSVQSAEGGKEALRLMNTQNFDAVLSDLRMPGLDGLSLFEEIMSLGKDLPVILMTAHGTIQDAVEATQRGVFGFLTKPIDHTELRDLLAKAVSQSQGSQTSAWREQIITRSMQMEQLLDQAHRVAQRDVSVLVSGASGTGKELLANAIHKASKRANKPFVAINCGALPENLLESELFGHAKGAFTGAVNEHQGLFREADGGTLFLDEIGDMPTPLQVKLLRALQEQVIRPVGSSKQIPVDVRIISATHKNLATEMSEGNFREDLYYRLNVVNLTLPTLRERSEDIPLLARYLLKKSAERHEVRVSRFSDDAMQLLTTELWPGNVRQLVNVVEQCVALTQTSVIAVHLVEQALSTSEQKWPTLTEARDAFEQSYLLKLLKMTDGNVTRAAEIAGRNRTDLHKLMKKHDLHSTDFKHD

SEQ ID NO: 157048 - DNA, 1335 bp, Escherichia coli 536
  CDS (1)..(1335): transl_table=11
atgagccataaacctgcgcatttattactggtcgatgacgatccgggattgctgaaactgcttggcctgcgcctgaccagcgaaggctacagtgtggtcacggcggaaagtggtgctgaaggattgcgggtacttaatcgcgaaaaagtagatttagtcatcagcgacctgcggatggatgaaatggacggtatgcagctgtttgctgaaatccagaaagtgcagccgggaatgccagtaattattcttaccgcgcatggttctattcctgatgccgttgctgcaacacagcagggcgtgttcagttttctcaccaagcctgtcgataaagatgcgctatatcaggcaattgacgatgcgctggaacaatccgcgccagccaccgacgaacgctggcgcgaggcgattgtcacccgcagcccgctgatgctgcgtttgctggaacaggcgcggctggtggcgcaatcagacgttagcgttttgattaacggccagagcggcaccgggaaagagattttcgcccaggctatccacaacgccagcccgcgcaacagcaaaccatttattgctattaactgtggcgcattgcccgagcaattgctggagtcggagctgtttggtcatgcgcgtggcgcgtttactggcgctgtcagcaatcgcgaaggtttattccaggcggcggaaggcggtacgctatttctcgatgagattggcgatatgcccgcaccgttgcaggtcaaactgctgcgcgtgttgcaggagcgtaaattgcgcccgctgggcagtaaccgcgatattgatatcgacgtgcggattatttctgcgacccaccgcgacctgccaaaagcgatgacgcgcggggaattccgtgaagacctctattaccgcctcaacgttgtcagcctgaaaattccggccctggcggagcgcacagaagacattccgctactggcaaatcacctgttgcgccaggcggcagagcgacataaaccgtttgtccgcgcgttctccaccgatgcgatgaaacgcctgatgaccgcgagctggccgggtaatgtgcgccagttggtcaacgtgattgaacagtgcgtggcgctgacctcatctccggtgattagtgatgcgctggtggagcaggcgctggagggtgaaaatacggcgctgccaacctttgttgaggcacgtaatcagtttgaactcaactatttgcgtaagctgctgcaaattaccaaaggcaacgtcacccacgcggcgagaatggcggggcgcaaccggacagaattttataaactgctatcccgacacgagctggatgcaaacgatttcaaggaatga

SEQ ID NO: 157049 - protein, 444 aa, Escherichia coli 536
MSHKPAHLLLVDDDPGLLKLLGLRLTSEGYSVVTAESGAEGLRVLNREKVDLVISDLRMDEMDGMQLFAEIQKVQPGMPVIILTAHGSIPDAVAATQQGVFSFLTKPVDKDALYQAIDDALEQSAPATDERWREAIVTRSPLMLRLLEQARLVAQSDVSVLINGQSGTGKEIFAQAIHNASPRNSKPFIAINCGALPEQLLESELFGHARGAFTGAVSNREGLFQAAEGGTLFLDEIGDMPAPLQVKLLRVLQERKLRPLGSNRDIDIDVRIISATHRDLPKAMTRGEFREDLYYRLNVVSLKIPALAERTEDIPLLANHLLRQAAERHKPFVRAFSTDAMKRLMTASWPGNVRQLVNVIEQCVALTSSPVISDALVEQALEGENTALPTFVEARNQFELNYLRKLLQITKGNVTHAARMAGRNRTEFYKLLSRHELDANDFKE

SEQ ID NO: 157050 - DNA, 1326 bp, Shigella flexneri 5 str. 8401
  CDS (1)..(1326): transl_table=11
atgacgcacgataatatcgatattctggtggtggatgatgacattagccactgcactattttgcaggctttactgcgcggctggggctataacgtcgcgctggcgaacagcgggcgacaggcgctggagcaggtgcgggaacaggtttttgatcttgtgctttgcgatgtgcgaatggcggagatggacggcatcgccacgctgaaagagatcaaagcgttaaacccggcaattccggtgctgattatgactgcgtactccagcgtcgagacggcggtagaggcactgaaaactggggcgctggattatctcatcaagccgctggatttcgataacctacaggcgacgctggaaaaggcgctcgcgcatacgcacagtattgatgctgaaacacctgcggtgactgccagccagttcggtatggtcggtaaaagcccggcgatgcaacacctgctcagtgaaatcgccctcgtcgcgccatcggaagccacggtgctgatccacggcgattccggcaccggtaaagagctggtcgccagggcgattcacgccagtagcgtacgtagcgaaaaaccgctggtaacgctcaactgtgcggcactcaacgaatccttgctggaatctgaattgttcggtcacgaaaaaggggcgtttactggagccgataaacgccgggaagggcgctttgttgaggcggacggcggcacgctgtttctcgatgaaattggcgatatctcgccgatgatgcaggtgcgtctgctgcgtgcgattcaggagcgcgaagttcagcgtgtcggtagcaaccagactatctcggttgatgtccggctgattgcggcgacccatcgcgatcttgccgcagaggtgaatgccgggcgttttcgccaggatctctactatcgcctgaatgtggtggcgattgaagtaccatcgctgcggcaacggcgggaagatatccctctgctggctggccattttcttcagcgctttgccgagcgtaatcgcaaggcggtaaaaggctttacgccacaggcgatggatttgctgatccactacgactggccgggaaatattcgtgaactggaaaacgcggtggaacgggcggtggtgctgctgaccggggaatatatttccgaacgcgagctgccgctggcgattgccagtacgccgatcccgctggggcaaagtcaggatattcagccgctggtggaagtggaaaaagaggtgattctggcggcgctggagaaaacgggcggcaacaaaaccgaagccgcccgtcagttagggatcacgcgcaaaacgctattggcaaaactgtcgcgttag

SEQ ID NO: 157051 - protein, 441 aa, Shigella flexneri 5 str. 8401
MTHDNIDILVVDDDISHCTILQALLRGWGYNVALANSGRQALEQVREQVFDLVLCDVRMAEMDGIATLKEIKALNPAIPVLIMTAYSSVETAVEALKTGALDYLIKPLDFDNLQATLEKALAHTHSIDAETPAVTASQFGMVGKSPAMQHLLSEIALVAPSEATVLIHGDSGTGKELVARAIHASSVRSEKPLVTLNCAALNESLLESELFGHEKGAFTGADKRREGRFVEADGGTLFLDEIGDISPMMQVRLLRAIQEREVQRVGSNQTISVDVRLIAATHRDLAAEVNAGRFRQDLYYRLNVVAIEVPSLRQRREDIPLLAGHFLQRFAERNRKAVKGFTPQAMDLLIHYDWPGNIRELENAVERAVVLLTGEYISERELPLAIASTPIPLGQSQDIQPLVEVEKEVILAALEKTGGNKTEAARQLGITRKTLLAKLSR

SEQ ID NO: 157052 - DNA, 1356 bp, Alkalilimnicola ehrlichei MLHE-1
  CDS (1)..(1356): transl_table=11
atggccgcaccacaagtgctcgtggtggacgacgaaccggacatccgcgacctgctgggcatcaccctgcgccgcatgggcatcaactgccgcaccgccgccagcctgcgcgaggcgcgggaccggctgcaggaacaggcctacgatctctgcctgacagacatgcgcctgccggatggcaacggcatcgaactggtccgctacatccagaagcgcttccccgacatgcccaccgcggtgatcaccgcctacggcaatatggacaccgccgtggaggccatgaaggccggtgccttcgacttcgtccccaaaccgctggacgtcgacaccctgcgccaggtggtcaaccaggccctcaagctgggaccggaaagcgccatcgaccgccgctcccgcgacgtgctgctgggcgactccgaggccatgcgccggatccgcggcatgatcgtcaaactggcccgcagccaggcaccggtctacatccaaggcccctccggcaccggcaaggagctggtcgcccgcctgatccacgacaagggcccgcgccgtgacggccccttcgtgcccgtcaactgtggcgccatcccctccgagctgatggagtcggagttcttcggccacaaaaagggcgccttcaccggagcccacgccgaccacaaggggctgttccagaccgccgaaggcggcaccctgtttctggatgaggtggccgagctgcccctgcctatgcaggtcaaactactccgggccattcaggagaaacgggtgcgcccggtgggggccagcaaggaggtcccggtggacgtacgcatcctttccgccacccaccaggatctggcccgccgggtggcggaaggcgccttccgcgaggacctctactaccggctgaacgtcatcccgctctccatcccacccctgcgcgagcgccccgaagacatccccccgctgatcgatcacctgctggaaaagatggtgggcgacgacccggaactacgaccgcgcctgaccaccgacgccctgcgcgccctgcagcgccacccctttcggggcaatgtgcgggagttggagaacatcctggaacgggcgctgacgctggccgacgaaggcgtcatcgacgtggaggacctgcacctgccggacggcgacgcctccgccccggcacagcagaacagtgagttggcgatccccgaaccggatgagggcttcgagctggaaggctacctgcaggacctggagcgcaccgccatccagcgggccctggccaagaccaacggcaataagaccgccgccgccaacctgctgggcatcagcttccgctccctgcgctacaagctgaaaaagctggaaatggagtag

SEQ ID NO: 157053 - protein, 451 aa, Alkalilimnicola ehrlichei MLHE-1
MAAPQVLVVDDEPDIRDLLGITLRRMGINCRTAASLREARDRLQEQAYDLCLTDMRLPDGNGIELVRYIQKRFPDMPTAVITAYGNMDTAVEAMKAGAFDFVPKPLDVDTLRQVVNQALKLGPESAIDRRSRDVLLGDSEAMRRIRGMIVKLARSQAPVYIQGPSGTGKELVARLIHDKGPRRDGPFVPVNCGAIPSELMESEFFGHKKGAFTGAHADHKGLFQTAEGGTLFLDEVAELPLPMQVKLLRAIQEKRVRPVGASKEVPVDVRILSATHQDLARRVAEGAFREDLYYRLNVIPLSIPPLRERPEDIPPLIDHLLEKMVGDDPELRPRLTTDALRALQRHPFRGNVRELENILERALTLADEGVIDVEDLHLPDGDASAPAQQNSELAIPEPDEGFELEGYLQDLERTAIQRALAKTNGNKTAAANLLGISFRSLRYKLKKLEME

SEQ ID NO: 157054 - DNA, 1368 bp, Nitrosomonas eutropha C91
  CDS (1)..(1368): transl_table=11
atgatgcaaagtaaaaaaattcttctggtggatgatgatccggatttacttgagctgctttccattcgcctgacagcagccggatatgaaacggttcccgccgaaagtgccgaagcggccatcaattatctcgacatatcacgaccgcatctcgtcattagtgacatacagatgagcggcatggatggtatggcattgttcgagcatatccatcgtcatattccaacgcttccggtcattatcctgaccgcgttcggtaccattccggatgctgtcgcggcaacgcagcgcgggatttttggttatctcacaaagccatataatcctaaaattctgctgagccaggtcgagcgtgcaattgatctggcgcctgctgtagatacaatctccagcaaagtgcctgccccgacatggcggaaagcgatcattactcgcagtgcgctcatggaagatctgcttgccaaagtggatcgcgtcgcgcaaggcaatgccagtgtgctgctgtctggtgaaagcggtgtcggcaaggaattatttgctcgtgccattcatcaagcatccaaacgctgtgagcagccgttcatcaccattaattgtgcggccattcctgaacaactcctggagtctgagctgttcggtcatgccaaaggtgcatttaccggggcagtccgggagcataaagggctgttccagctggcagaaggaggtagtttgtttctggacgagattggtgatatgcctttgctgttgcaggcaaaattgctacacgcactgcaggagagggttatccggccggttggaacagctcagagcatcccgattgatgtacgtatcatttctgctacgcataaagatctgaaatcggagatccaggcaggaaatttccgtgaagacctgtattaccggctttttgtggtgggtttgacaattccttcacttgcccagcgtggtgaagacattcctctgctggccaatcattttctgcgtgtatttgccgagaagcaccaaaaggatatcaatggcttttctccggaagcaatcagttttctgctggcatcttcctggccaggcaatatccgccagctgatgaatgttatcgaacaaagtatcgtcatgagtgcggttcctctcatctccagcgaactgatccgcgatgccatgcacaaggatgaagagcagatgatctcgtttgaggaagcccgcaaacagtttgaaagagattatctcgtcaaggtgctgaaaataactgccggaaatgtaacccaggcggccaggctggccaagcgcaaccgcaccgagttttacaaactgctgcaacgacaccagttggatttcacactctataagtccttgcaggaaaaggtctga

SEQ ID NO: 157055 - protein, 455 aa, Nitrosomonas eutropha C91
MMQSKKILLVDDDPDLLELLSIRLTAAGYETVPAESAEAAINYLDISRPHLVISDIQMSGMDGMALFEHIHRHIPTLPVIILTAFGTIPDAVAATQRGIFGYLTKPYNPKILLSQVERAIDLAPAVDTISSKVPAPTWRKAIITRSALMEDLLAKVDRVAQGNASVLLSGESGVGKELFARAIHQASKRCEQPFITINCAAIPEQLLESELFGHAKGAFTGAVREHKGLFQLAEGGSLFLDEIGDMPLLLQAKLLHALQERVIRPVGTAQSIPIDVRIISATHKDLKSEIQAGNFREDLYYRLFVVGLTIPSLAQRGEDIPLLANHFLRVFAEKHQKDINGFSPEAISFLLASSWPGNIRQLMNVIEQSIVMSAVPLISSELIRDAMHKDEEQMISFEEARKQFERDYLVKVLKITAGNVTQAARLAKRNRTEFYKLLQRHQLDFTLYKSLQEKV

SEQ ID NO: 157056 - DNA, 1389 bp, Syntrophobacter fumaroxidans MPOB
  CDS (1)..(1389): transl_table=11
atggcgggagaaaagatccttgtcgtggatgatgatcgggggctgcgtaccctgatgaaggcccgcctggaaggggccgggtaccgggtgacgcttgcggagcggggagaggaagctctgaccgccgcgcaggaggaggtctacagcgcagccgtgctggatctcaaaatggaggagatggacggcatggtgctgctggagaagctgctcctggttcagccctacctccccgtgatcatcctgaccgcctacgggacaatcgccggagccgtcgaagccaccaaaaagggggcctacgacttcatgaccaaaccgttcgaagccaaggatctcctgtatcgtctggagaaagccctggaggtgggcagcctcagaatggaagtggaacggctgcggaccctcgtgcgcgaacgctaccatttcgacaacatcattgcgtcgagcgagaagatgcagcaggttctgctccaggtgtcgcaaatcgccgccaccgactcgacggtctgtctctacggggaaagcggcacgggcaaggagttgatcgcaaaagtgcttcacctgaccagcactcggtcccgggggccgttcgtggcgatcaattgcggagccattcccgaaggcctgctggagagcgagttgttcgggcacaccaagggtgctttcacgggtgcggatcaggcgaagaaagggcttctgcaacaggctgaaaggggcacgctcttcatggacgagattgcggagctcactccggcactgcaggtcaagctattgcgggtgttccaggaccatgagttctatcccgtcggaggcgtccaaccggtcaaggtggatacgcgccttgtggccgccaccaaccaggacctatggaaagcgatccaggacgggaaattccgggaagatctatattaccgcatccatgtcattccggtttatctgccgcctcttcgcgaacgccccgaagatatcccgctgctggcccatcacttcctgcaacacttcaacggcaccatgaacaagaacatccccggcttttctccggatgccatgcaccgcctgatgctgcatcgatggcccgggaacgtccgcgaactggccaacgtagtggagagggccgtcgtgctggcccgggagggcaacatctgcgccgagcacctgctcctggagcgggaggcggtttccgactcggggaccgaacttcctcccctgacggcggcacgggacgaattcgaacgggcgtacctgatccaggtcctccacagcacgaagggcaacgtctcgcgcgcggcggccaaggcgggtcgataccgcgccgagttctacaagctgttgcgcaagtacgatctggaccccgccaccttcaaggaagaggaacgctcgtccggcgcgtag

SEQ ID NO: 157057 - protein, 462 aa, Syntrophobacter fumaroxidans MPOB
MAGEKILVVDDDRGLRTLMKARLEGAGYRVTLAERGEEALTAAQEEVYSAAVLDLKMEEMDGMVLLEKLLLVQPYLPVIILTAYGTIAGAVEATKKGAYDFMTKPFEAKDLLYRLEKALEVGSLRMEVERLRTLVRERYHFDNIIASSEKMQQVLLQVSQIAATDSTVCLYGESGTGKELIAKVLHLTSTRSRGPFVAINCGAIPEGLLESELFGHTKGAFTGADQAKKGLLQQAERGTLFMDEIAELTPALQVKLLRVFQDHEFYPVGGVQPVKVDTRLVAATNQDLWKAIQDGKFREDLYYRIHVIPVYLPPLRERPEDIPLLAHHFLQHFNGTMNKNIPGFSPDAMHRLMLHRWPGNVRELANVVERAVVLAREGNICAEHLLLEREAVSDSGTELPPLTAARDEFERAYLIQVLHSTKGNVSRAAAKAGRYRAEFYKLLRKYDLDPATFKEEERSSGA

SEQ ID NO: 157058 - DNA, 1281 bp, Aeromonas hydrophila subsp. hydrophila ATCC 7966
  CDS (1)..(1281): transl_table=11
atgagtcgcatcctgctggtcgatgacgatgccagcctgctcaagctgatgagcatgcgcctgcgcagccagggctatgaggtggataccgccgacagcgccgaaggggcgctggaccggctgcgccagcaacgggccgatctggtgctgagcgatctgcgcatggccggcatggacgggctggcgctgttcgagcggatccagtcccagtggctggggctgccggtcatcatcatgaccgcccatggcaccattcccgatgccattcaggccacccgctccggggtgttcagttttctcaccaagcccatcgacaaggatgagctgttcgccaccatagaacacgcgttgagcctgacgcgcccaaagcagcgacaggattggcagtcgctgatcctgacccgcaacccgcagatggagcagttgctgatccaggctggcagcatcgccgccatggaggtgcccgtgctgatcatgggcccttccggttccggcaagggcgtcatgacccaggcgctgcaccaggccagcagccggcgtgacaagccactgcacgtcatcaactgtgccgcgctgccgtgggcggcgctggatctgcagctgtttggcgaggatggccagtccggcctgtttgaacaggccaagggagcgaccctgtttctcgacgagataggggacctgtcggaatcgctgcaggccaagctgctgcaggtgttgcaggagtacggccagggcacgcccgaggtgcgggtcatcagctccagccatcaggatctggtggcggcgatggaggaggggcgctttcgggaagatctcttctatcggctcaacgtggccaacatcaccttgccccccctcagcgcccgcagcgaagacattccgctgctggccaggcaggcgctggatgactatcgcagccgccatggcgactgcgccgccctcggcttttcgccggaggcgctggccctgctggcggcggcgggttggcccggtaacgtgcgccagctctgcagcgtggtggagcagctggccagcctctgctgcagcccggtgatcggtgccgccatggtggagtcggcgctgagcggcggcagtggcggcatcccttcgttcaacgaggcacgggccgagttcgagaaggagtatctgatccggctgctgcgcaccaccgagggcaatgtgaccctggcagccaacatggcgggcagaaaccgcaccgatttctacaagctgttgaatcggcacggcatcgaagccgcgaacttcaagtcgaagggataa

SEQ ID NO: 157059 - protein, 426 aa, Aeromonas hydrophila subsp. hydrophila ATCC 7966
MSRILLVDDDASLLKLMSMRLRSQGYEVDTADSAEGALDRLRQQRADLVLSDLRMAGMDGLALFERIQSQWLGLPVIIMTAHGTIPDAIQATRSGVFSFLTKPIDKDELFATIEHALSLTRPKQRQDWQSLILTRNPQMEQLLIQAGSIAAMEVPVLIMGPSGSGKGVMTQALHQASSRRDKPLHVINCAALPWAALDLQLFGEDGQSGLFEQAKGATLFLDEIGDLSESLQAKLLQVLQEYGQGTPEVRVISSSHQDLVAAMEEGRFREDLFYRLNVANITLPPLSARSEDIPLLARQALDDYRSRHGDCAALGFSPEALALLAAAGWPGNVRQLCSVVEQLASLCCSPVIGAAMVESALSGGSGGIPSFNEARAEFEKEYLIRLLRTTEGNVTLAANMAGRNRTDFYKLLNRHGIEAANFKSKG

SEQ ID NO: 157060 - DNA, 1386 bp, Pelobacter propionicus DSM 2379
  CDS (1)..(1386): transl_table=11
atgccacagaaccagattggcccgaatcctgaaagccgcatcctgatcgttgatgacgaggggacgtccctgctgattctggagaactacctccagcaccatgggcatgtggcgatctgcgccgccaacggtcgtgaggcactcgccctgctgaaaaagcagccggttgacctggtcatatccgatctggtcatgccgggaatgggcgggatcgagttcatggatctggccaaggaacggcacccgggactcccttttatcttctatacggcactggggagcatcgagagcgcggtctcggccatcaagcagggcgccttcgactatctggaaaagccgctggaccccaagaccttcgacgtggtcatccagcgcgccctggagtttgcccgcctctcccacgagaacgttcaactgcgcgagcatttcgccgagttgttcagtttccagaacatcgtgacccaatctcctgccatgcgcacggtcctggagttggcctcccgggtggccgcgtccccccggaccaccgtcagcctgaccggcgagagcggcaccggcaaggaggtgctggcccgggcgatccattttgcctccggctgcctgccgagcaatttcgtggcggtcaactgcgccgccatccccgaggcgcttctggagagcgagttgttcggccatgtgcgcggcgcgttcaccggggcggaacgtgaccgtgaggggaagttcagcctggcccgggggggaaccgtccttctggacgagatcggcgacatgccgcttccgctccaggccaagctgctgcgggtactggaggagcggaccttcgagaaggtgggggacaaccgcccgcagccggtagatttccgggttatcgttgccacctatcgcgacctagcccagctggtacgcaagggcagattccgcgaagacctgtaccatcgcatcaacgttgttcccatcgcgatcccccccctcagggagcggctggaggacatcccgcttttggtggacttcttcctgaagctcttccgccagcaccaggggaaggcgcttccgggggtctcgaagaaagccatggacctgctcatcgcccactcctggccgggcaatgtgcgcgagctgcgcaacgtgctggaatatgccgccatcatggtcagcgacgagctgatccggcccgaacacctgcgcctctcctcctcttcgccgtcagcctctgctctcccgtcctccagcggcaccgttgaattccacatcagtctccccgccgaagatgtttccctggatgccgtcgtctcccgggtcctggaaagcgccctccagcgttgccacggcaacaagtcccgggccgcggccctgctcaaggtcaaccgcaagatgttctatcgctga

SEQ ID NO: 157061 - protein, 461 aa, Pelobacter propionicus DSM 2379
MPQNQIGPNPESRILIVDDEGTSLLILENYLQHHGHVAICAANGREALALLKKQPVDLVISDLVMPGMGGIEFMDLAKERHPGLPFIFYTALGSIESAVSAIKQGAFDYLEKPLDPKTFDVVIQRALEFARLSHENVQLREHFAELFSFQNIVTQSPAMRTVLELASRVAASPRTTVSLTGESGTGKEVLARAIHFASGCLPSNFVAVNCAAIPEALLESELFGHVRGAFTGAERDREGKFSLARGGTVLLDEIGDMPLPLQAKLLRVLEERTFEKVGDNRPQPVDFRVIVATYRDLAQLVRKGRFREDLYHRINVVPIAIPPLRERLEDIPLLVDFFLKLFRQHQGKALPGVSKKAMDLLIAHSWPGNVRELRNVLEYAAIMVSDELIRPEHLRLSSSSPSASALPSSSGTVEFHISLPAEDVSLDAVVSRVLESALQRCHGNKSRAAALLKVNRKMFYR

SEQ ID NO: 157062 - DNA, 1398 bp, Azoarcus sp. BH72
  CDS (1)..(1398): transl_table=11
atgacgccgaccgagcaccgccatctgctggtggtcgatgacgaccccgacctgctgcgcctgctggcgatgcggctgcaggccaacggctatcgcgtcagcccggtgggcaccgccgaagcagcactcgcacgtcttgcggtggaacgggtggacctggtgttgagcgatgtccgcctgcccgaccgcgacggcctggctctgttcgaagaggtacggcgcctgtaccccgcactgccggtgatcctgctcacggcgcacggcaccatcccggacgcgatcgatgcgacctcgcgtggcgtcgccggctacctgaccaagccctacgacagccaggacctgctggacaacgtggagcgcgcgctgcatctggccgcgccggccggcgatacgggcagcggcaccaccaccgaggcctacgcattcgaaggcatgctcagccgcagcacgcgcatgcacgcgctgttcgacgaaacccggctggtcgcggcctccgacgccagcgtgctgatccgcggcgagagcggcaccggcaaggaagtgctcgcgcacgccatccatgccgccagcccgcgcgcctcggcgcccttcgttgcggtcaattgcggcgcgattccggaagcgctgctcgaatcggaactgttcggtcacgtccgcggcgccttcaccggcgcggtaaccaatcgccgcggcctcttccaggcggcccatggcggcaccttgttcctggacgagatcggcgacatgccgctgacgctgcaggtgaaactgctgcgcgtgctgcaggagcgcgcggtgcgccccgtgggctcgacccgcagcgagccgatcgacgtccgcatcgtctcggccacccaccgcgatctcgacagcgaactcaccgccggccggtttcgtgaagacctgtattaccggatcaacgtggtcaacctcaacctgccgacgctgagcgaacggcgcgaggacattcctctgcttgccgagcacttcctgcgcgaacaggcggcgcgctacgggaaacccctgcgcggcttcgcccccggcgcactggaagcgctggtcaccgccagctggccgggcaacatccgccagttgcagaacgtggtggagcagacctgcgccctcgccacgacgccactgattccgctcgcgctggtcaaacgcgcgctgcgcgcaacgccgcccgcggcactgagctatgccgaggccaagcagcgtttcgaacgcggctatctcgtccagttgctcaagctcaccgagggccgcgttgccgatgctgcccgcctggcgcaacgcaaccgcaccgagttctaccgcctcatccagcgccacggcctggatccggcgctgttccgcggccccgcatcgccgcgcgaatccgctgacgacggcgcttga

SEQ ID NO: 157063 - protein, 465 aa, Azoarcus sp. BH72
MTPTEHRHLLVVDDDPDLLRLLAMRLQANGYRVSPVGTAEAALARLAVERVDLVLSDVRLPDRDGLALFEEVRRLYPALPVILLTAHGTIPDAIDATSRGVAGYLTKPYDSQDLLDNVERALHLAAPAGDTGSGTTTEAYAFEGMLSRSTRMHALFDETRLVAASDASVLIRGESGTGKEVLAHAIHAASPRASAPFVAVNCGAIPEALLESELFGHVRGAFTGAVTNRRGLFQAAHGGTLFLDEIGDMPLTLQVKLLRVLQERAVRPVGSTRSEPIDVRIVSATHRDLDSELTAGRFREDLYYRINVVNLNLPTLSERREDIPLLAEHFLREQAARYGKPLRGFAPGALEALVTASWPGNIRQLQNVVEQTCALATTPLIPLALVKRALRATPPAALSYAEAKQRFERGYLVQLLKLTEGRVADAARLAQRNRTEFYRLIQRHGLDPALFRGPASPRESADDGA

SEQ ID NO: 157064 - DNA, 1386 bp, Marinobacter aquaeolei VT8
  CDS (1)..(1386): transl_table=11
atgagcagccggcctgtcacgatcctgctggtcgaagatgacgccagccttggccagctgctgatggaggagttggaagtggatggttaccgcgtacgcagggtcagtatggtggccgaggcgcggactgctctgacagacgaacgcccgggcctgatcgtatcggatctgcgcttgcccgatggtgacggtctggagattctgtcgcttcagcaggccgagcatcccggtattccctttatcgtgattaccgcgtttgggacggtggaccaggcggtcgatgctttgaaggccggcgctgatgattttctgaccaagccgctctcaacggatcatctccggttaaagatcaaacggttgctggcccaggcggatctgaaccggcagttggcggagtatcagtccgggcgcggcggcgatgaaagcatgggcttgatcggcggcagtgcgatgatggatcgcctcaggtcagacattcgccaggttgcccgcagtcaggccgcggttctgattaatggcgaaagtggaaccgggaaagagctggttgcgagggcaatccaccagcaaagtgagcgctcagcacggccgttccttgcggtgaattgtgccggtataccgccagacttgatggaaagtgaattcttcggtcacgaggctggtgcttttaccggtgcacggcaggcccgtagggggctgtttgcagaggcgaacggtggcaccttgctgctggacgagattggtgaaatgccattggcgctgcaagccaaactgcttcgggtgttgcaggagggctgcatcaaaccagtgggggctgaccatgaggaaatggtggatgttcgcattctggcggcaacgcatgtggatttgcttcgggctgttgagcagggtcatttccgcgaagacctgtattatcgtctcgaaaccctgtcgttaacggtgcctcccctgagggagcgggatgaggatgttgaattgctggccatgcattttctgggtgaggcagcacgtcgtcacagccgggggttcctgaagttcagtgacgtcacgttaaggatactccgcgattatccgttcccgggcaatgtgcgtgagctgtccagtgcgattgagcgggcggtcactttttgtgaaagcgataccatacagcccgagcatttgcccgaacgcatccggaagcgccagggcgggattgttcaggctgccgttgccgcttcgcccgggaaactttccgaatggcccaccttggagatgctccagcaggattacgtgcgccgggtcatggctgccgttgatggtaataaacgccgggcggcccagatactcggcattaatcgcagaacactgtatcgctggctggagtcggatttggagcatgggcatgactga

SEQ ID NO: 157065 - protein, 461 aa, Marinobacter aquaeolei VT8
MSSRPVTILLVEDDASLGQLLMEELEVDGYRVRRVSMVAEARTALTDERPGLIVSDLRLPDGDGLEILSLQQAEHPGIPFIVITAFGTVDQAVDALKAGADDFLTKPLSTDHLRLKIKRLLAQADLNRQLAEYQSGRGGDESMGLIGGSAMMDRLRSDIRQVARSQAAVLINGESGTGKELVARAIHQQSERSARPFLAVNCAGIPPDLMESEFFGHEAGAFTGARQARRGLFAEANGGTLLLDEIGEMPLALQAKLLRVLQEGCIKPVGADHEEMVDVRILAATHVDLLRAVEQGHFREDLYYRLETLSLTVPPLRERDEDVELLAMHFLGEAARRHSRGFLKFSDVTLRILRDYPFPGNVRELSSAIERAVTFCESDTIQPEHLPERIRKRQGGIVQAAVAASPGKLSEWPTLEMLQQDYVRRVMAAVDGNKRRAAQILGINRRTLYRWLESDLEHGHD

SEQ ID NO: 157066 - DNA, 1404 bp, Desulfovibrio vulgaris DP4
  CDS (1)..(1404): transl_table=11
atgccaacgacatgtgacgaacacatcctcatcgtcgatgacgaacccgacttcgcgcacggactggcaagactggtgagcagggactttccggcagccagtgtctctgtggcgctttccggcgctgaggcgctgcacatcatccagggcagcggggtcgccctgctgctcaccgacctgcggatgcccgacatggatggaatggaactcatgcagcaggccatgaccgtggaccccacgacttcggtcatcctgctcacggcgcacggttccatagagacggcggtcgccgccctcaagaacggcgcatacgacttcctcaccaagcccgtccgtcgcgaagaactgcaaaggaccctcaacaaggcactggaacggatacgcatcctcaaagagaacaaacggttgcgtcaaatgatgcaacaaggctgcatcgaacgccagatgataggcgagtctccggtcatgcaacgcctcaaggagactatcgcggccatcgcagccacggactactccgtgctcatcaggggagaatcagggacaggcaaggaactcgtcgccgacatgctgcaccgcctcggcagcaggagggagcgcccactagtcaaagtgaactgcccctccatccccgaccagcttctggaaagtgaactgttcggacacgtcagaggggcattcacgggggcagacagggctcggcgcgggctcttcatgtcagcgcaacggggaacgctcctgctggatgaaatcggggacatcggtgaggcactccagaccaagctgctccgggtcttgcaggagcgcgagattcgccctgtggggtcaagcgcgagcaccctcgtggatgtgcgtatcatcgccagcaccaacagggccctcgaagaacgcatcaagcacggactcttccgggaagacctcttctacaggctcaacgtgctgaccatccacacgcctcccctccgagaacggcgcgacgacatcccactgctggcagaccacttcgtcgcggcgacttgccgggagctctccagccctgtgaaacgcatctcacccggtgcacttgcctgtcttgccggaagggagtggcccggcaatgtcagggaactacagaactacatccgcaggctcgtcgtcttctgcccaggagacaccatcgacaccgcccaccttcgtcttgtggacggcacgacctgcccgacgacggtggagacgccatcccttgttccctacaaagaggcgaagggggctgtcgtggaggatttcacccgccgttacgtcgaaggcctcttgcgccagacgggaggcaacatatccgaggcggcgcgactttcaggcatcgaacgcgtgtcactccagaagatcctgcgtcgtctgggcacttccggagacacgttcaaaggatag

SEQ ID NO: 157067 - protein, 467 aa, Desulfovibrio vulgaris DP4
MPTTCDEHILIVDDEPDFAHGLARLVSRDFPAASVSVALSGAEALHIIQGSGVALLLTDLRMPDMDGMELMQQAMTVDPTTSVILLTAHGSIETAVAALKNGAYDFLTKPVRREELQRTLNKALERIRILKENKRLRQMMQQGCIERQMIGESPVMQRLKETIAAIAATDYSVLIRGESGTGKELVADMLHRLGSRRERPLVKVNCPSIPDQLLESELFGHVRGAFTGADRARRGLFMSAQRGTLLLDEIGDIGEALQTKLLRVLQEREIRPVGSSASTLVDVRIIASTNRALEERIKHGLFREDLFYRLNVLTIHTPPLRERRDDIPLLADHFVAATCRELSSPVKRISPGALACLAGREWPGNVRELQNYIRRLVVFCPGDTIDTAHLRLVDGTTCPTTVETPSLVPYKEAKGAVVEDFTRRYVEGLLRQTGGNISEAARLSGIERVSLQKILRRLGTSGDTFKG

SEQ ID NO: 157068 - DNA, 1416 bp, Acidovorax avenae subsp. citrulli AAC00-1
  CDS (1)..(1416): transl_table=11
atgcccgccacgcccccgacgaaaacctccgcgccccgtccacgcatcctcgtggtggacgacgatgccgacatgctgcggctgctgtcgctgcgactcaacgcggccggctacgaaatcacggccgtcccctccgccgaagccgcgctcgcccagctggaaaccagccgcccgcagctcgtgctgagcgacgtgcgcctgcccggccgcgacggcctggccctgttcgacgaggtgcgctcgcgccatccttcgctgcccgtgatcctgctcaccgcgcacggcaccatccccgacgcggtcgaggccacggcgcgcggcgtgttcacctacctcaccaagccctacgacgccaaggacctgctcgacaagatcgcgcaggccctggcgctgagcgcgcccgccacgcagacgccccaggccgacagcacctggcgcgccgagatcgtgagccgctccaaccgcatggccgacctgctcgccgaggcccgcatggtggcccagtcggacgccagcgtgctgctgctgggcgacagcggcaccggcaaggaactgctggcgcgcgccatccaccgggccagcccgcgcgcggcgcggcccttcgtggccgtcaattgcggcgccatccccgaggccctgctggagtccgaactgttcggccacatgaagggcgccttcaccgacgcgcacagcaaccacaagggcctgttccaggcggccgacggcggcacgctgctgctcgacgaaatcggcgacatgccgcccgcgctgcaggtcaagctgctgcgcgtgctgcaggagcgcgccgtgcgccccgtcggcgcgagccaggccacgccggtgaacgtgcgcatcgtctccgccacgcaccgcgacctggaggccgccatggccacgggccagttccgcgaggacctctactaccgcctcaacgtggtcacgctgacgctgcccaccctggccgaccgccgcgaggacatcccgctactggccaaccatttcctcgaccagctggcgcgcaagtacgacaagcgcctgtcgggcttttcgccggaagcgctcaaggcgctcacggcggcgccctggccaggcaacgtgcggcagctctacaacgtggtggagcaggcctgcgcgctctccaccacgcccctggtaccgctgggcctcgtgcagcgcgcgctgcgcacgcccaccgtgcaggtgctgagcttcaccgaggcgcgccagcgcttcgagcgcgaatacctggtggacctgctgaagatgaccgacggcaacgtcgccgatgccgcgcggctggcgcagcgcaaccgtacggagttctaccgcctgctgcagaagcacgcgctgacgccgggccagttcaagagcgacggggccccgccggacgatgtcgccgaagagcgacaacaataa

SEQ ID NO: 157069 - protein, 471 aa, Acidovorax avenae subsp. citrulli AAC00-1
MPATPPTKTSAPRPRILVVDDDADMLRLLSLRLNAAGYEITAVPSAEAALAQLETSRPQLVLSDVRLPGRDGLALFDEVRSRHPSLPVILLTAHGTIPDAVEATARGVFTYLTKPYDAKDLLDKIAQALALSAPATQTPQADSTWRAEIVSRSNRMADLLAEARMVAQSDASVLLLGDSGTGKELLARAIHRASPRAARPFVAVNCGAIPEALLESELFGHMKGAFTDAHSNHKGLFQAADGGTLLLDEIGDMPPALQVKLLRVLQERAVRPVGASQATPVNVRIVSATHRDLEAAMATGQFREDLYYRLNVVTLTLPTLADRREDIPLLANHFLDQLARKYDKRLSGFSPEALKALTAAPWPGNVRQLYNVVEQACALSTTPLVPLGLVQRALRTPTVQVLSFTEARQRFEREYLVDLLKMTDGNVADAARLAQRNRTEFYRLLQKHALTPGQFKSDGAPPDDVAEERQQ

SEQ ID NO: 157070 - DNA, 1368 bp, Blastopirellula marina DSM 3645
  CDS (1)..(1368): transl_table=11
atgcacggtaagatcctgatcgttgacgaccaacagagcatgtgcgaattgattcagaccgatctgaaactgcggtcgtatgaatcgagctggtttacgtcggcggaagcggcgttccatgctttgaaggaagatgattttgacgccgtgttgaccgacatccgcatgccgggcgcctctgggattcaactttgcgaacagattgtcgcaaatcgccctgacgtgccggtgatcgtcatgaccgcctttggaagcttggaaacggcagtagctgcgattcgtgccggcgcttttgactttgtcaccaagccgatcgaaatggatctgttggccatttctttggagcgcgccgtcaagcatcggcggttgcagcagcaggtcaaattgttaggtgacgccgtggatcactcgcgtcatttcggcgaaatcatcggcgaaagtccgccgatgcaaaagttgtttgaccagatatcacggatcggccaatcgtctgcatcagtgctgatcaccggcgaaagcggaaccggtaaggaacttgtcgcgcggttgttgcatcgacagagccgacgcgccgatgggccgtttgtcgcgatcaattgcgcagcgcttcccgaagcgctactggaaagcgagctctttggtcacgccaaaggcgcctttaccgatgctcgagccgagcgcaagggactttttcagcaggccgagaaaggcacgttgctactggatgaaatcggtgagatgccgatttcgatgcaagtgaagctattgcgggcgctagaggaaaataagcttcgccctgtgggcggcgaccaggaaattgaatttgacgttcggatcttggccgccaccaaccgcgacctggaagcggcggtagaggatcaaaagttccgagacgatttattctatcgcatcaatgttattcaactcgaactgccgccgctgcgatctcgcgggacggacattctgctgttggctcgccattttgtcacaacacacgccaaacgtgcggaaaaatcggtcgcgaatatttccgagcaagccagtgagaggctattggcctattcctggccaggcaacgtacgcgagctgcgaaatgtcatcgaacgcgccgtcgcgctgacgcgctatgagatgctcgccgtcgaagacttgcctgacaagattcgagattatcgcggttctcaggtcttcatcggcggcgaagaccctgccgaactggcgccgatggatgaggtcgagcgccgttatatcctccacgtgctcagcgctgtcggcgacaacaaaacgaccgccgcacgaatcctcggcctcgaccggaagacgctttatcgaaagcttaagcaatacggcgtggaagagaatatctag

SEQ ID NO: 157071 - protein, 455 aa, Blastopirellula marina DSM 3645
MHGKILIVDDQQSMCELIQTDLKLRSYESSWFTSAEAAFHALKEDDFDAVLTDIRMPGASGIQLCEQIVANRPDVPVIVMTAFGSLETAVAAIRAGAFDFVTKPIEMDLLAISLERAVKHRRLQQQVKLLGDAVDHSRHFGEIIGESPPMQKLFDQISRIGQSSASVLITGESGTGKELVARLLHRQSRRADGPFVAINCAALPEALLESELFGHAKGAFTDARAERKGLFQQAEKGTLLLDEIGEMPISMQVKLLRALEENKLRPVGGDQEIEFDVRILAATNRDLEAAVEDQKFRDDLFYRINVIQLELPPLRSRGTDILLLARHFVTTHAKRAEKSVANISEQASERLLAYSWPGNVRELRNVIERAVALTRYEMLAVEDLPDKIRDYRGSQVFIGGEDPAELAPMDEVERRYILHVLSAVGDNKTTAARILGLDRKTLYRKLKQYGVEENI

SEQ ID NO: 157072 - DNA, 1368 bp, Reinekea sp. MED297
  CDS (1)..(1368): transl_table=11
atgagcgctatcgatacggcaagcccagttcctaagccacaagatccggttttggttatcgacgatgacagtcagctcttaaagcttgtagaaattcgactgaacagcgaaggctatgcggttgtgacggccgacagtgcagctcaagcgaaaaagaaacttgcctcgcaacgtgtttcgatggtgctgtctgatttgagaatgccgggtgaagatgggttgatgctgctggattttattaatgcagagttcccaacgattccagtgattattatgacggctcatggcaccattcacgatgccgttgaagccactgaaaatggcgcacttggctttttaacgaaaccaatcgatcatcaacagttgcgatcaaccttgactaatgcttgtgcgcaaatcagcaatgcgactggcggggattggcagtctgatatcgtgtatcaaagccagaaaatgcatcagctcatggagcaggttgggcaagttgcgcctcgtgatatcagtttgatgattaccggtgccagcggcacgggtaaagagctgatggcgcaggcgatacataaggccagttgtcgcgccaataaacctttcattgctgtgaactgcggagccttgccagaacatctgcttgaatctgagttgtttggccacaaaaagggcgcgtttaccggggccgtcagtgatcatcaaggcctgtttcaggcggccgacggaggtacattgtttcttgacgaaatcggcgacatgcctctggcgttacaggtgaaactactgcgagtgttgcaggagaaatccattcgaccggttggcagtactaagaccatcgatgtggacgtaagggttgtctcagcgacgcatcgaaacctgaaagaagctatgtcggaagggcagtttcgcgaagatctgttttaccgattgtgtgtggtcaatgttcaaatcccgagtctttcggaacggcctgaagacatccctgtattaacgcgtgtattgctgcaccgcattgctcaaaagcagggggttaagatcacgcgttttgcggacgatgcgatgcttaagctctgccaaagtaattggccgggtaatgtacggcagctgatcaatgtaattgagcaatgtgtggccatgtcgcaatcgcccgtcatcagccgagcactggtgaatcaggcactgttggactcacacaattacttccctaccttagcggaggctcgtgatgcttatgagcggtcgtatttgatcagagtgttgacgatgaccgatggcgtcgcctctcgagcggcggaactggcgggtcggaaccgtactgaattttataaactgctcaaaaaacatgagttggatgtaaacagttttaaacctcaacactga

SEQ ID NO: 157073 - protein, 455 aa, Reinekea sp. MED297
MSAIDTASPVPKPQDPVLVIDDDSQLLKLVEIRLNSEGYAVVTADSAAQAKKKLASQRVSMVLSDLRMPGEDGLMLLDFINAEFPTIPVIIMTAHGTIHDAVEATENGALGFLTKPIDHQQLRSTLTNACAQISNATGGDWQSDIVYQSQKMHQLMEQVGQVAPRDISLMITGASGTGKELMAQAIHKASCRANKPFIAVNCGALPEHLLESELFGHKKGAFTGAVSDHQGLFQAADGGTLFLDEIGDMPLALQVKLLRVLQEKSIRPVGSTKTIDVDVRVVSATHRNLKEAMSEGQFREDLFYRLCVVNVQIPSLSERPEDIPVLTRVLLHRIAQKQGVKITRFADDAMLKLCQSNWPGNVRQLINVIEQCVAMSQSPVISRALVNQALLDSHNYFPTLAEARDAYERSYLIRVLTMTDGVASRAAELAGRNRTEFYKLLKKHELDVNSFKPQH

SEQ ID NO: 157074 - DNA, 1359 bp, Nitrococcus mobilis Nb-231
  CDS (1)..(1359): transl_table=11
atggccaaaggctaccgaatcctggtggtcgacgacgaccccggggtgctgcgtctgctctccattcgactcaaatccaacggctacgaggtggcaactgctcaaagcggtgaggaagcgttatcgaattttgcaggcatcagaccgcatctggtaataacggatctgcgcatggacggcatggatggcatgacgctgttccagaacctgcacaaacagcaccctacgctacccgtgatcattcttacggctcacggctcgattccggatgccgtggaggcaactcagaaaggcgtcttcggtttcattaccaagccgttcgaggcccccgcgctattacaacaagtggaaagtgccttgcgcctttcgggtatcgtagagccagacaccgcgggcaaacaaaccaatacctggcgtgccgagatcatcagccgcagccctttgatggaagacgtcctgcagcgcgccaagctgatcgctccgagcgaagccagcgtattcatacagggtgagagcggcaccggcaaagaattgctggcaaaagccatccataatacaagccggtgcagcaaggggcccttcatcgccgtcaattgtggcgcgatacccgaaccactgctggaatccgaactttttggccataaaaaaggcgccttcacgggcgctaatcaagaccacgagggccttttcaaggccgctgacggcgggacgctattcctcgatgaaatcggggatatgccgctggcgctccaagtcaagctgctgcgagtgctgcaggagcatcaagtgcggccagtcggctacacgcaggacatatcggtcaatgtgcggatcatctccgccacccatcgtgacctggaactagagatggccgagggccgtttccgcgaggatctctactatcggctcaacgtagtcaccttatccctgccctcgctcgcgcagcgccgagaagatgtgcctgttctggccaatcacttccttcatcaactggcacgcaaatatgaaaagaatctcaaaggcttttcgcaggaggccatggagcacctggtcagcgctcagtggccgggtaatatccggcagctttataacgtaatcgagcaggtggcgattttatccgcgacgccgatcatttcatacgatctggtgcagcaagccttgcggggggatgcccctggactgccgcctttcgccgatgctcgccgcgatttcgagcgcagttacttagttaagctgctgcagatcaccgaaggtaatgtcagccgtgctgcccgactggcgaaaagaaaccgcaccgaattctacaaattgctcaaccgccacgacctcaatcccagcctgttcaaacaggcacgctga

SEQ ID NO: 157075 - protein, 452 aa, Nitrococcus mobilis Nb-231
MAKGYRILVVDDDPGVLRLLSIRLKSNGYEVATAQSGEEALSNFAGIRPHLVITDLRMDGMDGMTLFQNLHKQHPTLPVIILTAHGSIPDAVEATQKGVFGFITKPFEAPALLQQVESALRLSGIVEPDTAGKQTNTWRAEIISRSPLMEDVLQRAKLIAPSEASVFIQGESGTGKELLAKAIHNTSRCSKGPFIAVNCGAIPEPLLESELFGHKKGAFTGANQDHEGLFKAADGGTLFLDEIGDMPLALQVKLLRVLQEHQVRPVGYTQDISVNVRIISATHRDLELEMAEGRFREDLYYRLNVVTLSLPSLAQRREDVPVLANHFLHQLARKYEKNLKGFSQEAMEHLVSAQWPGNIRQLYNVIEQVAILSATPIISYDLVQQALRGDAPGLPPFADARRDFERSYLVKLLQITEGNVSRAARLAKRNRTEFYKLLNRHDLNPSLFKQAR

SEQ ID NO: 157076 - DNA, 1320 bp, Neptuniibacter caesariensis
  CDS (1)..(1320): transl_table=11
atgaaccctgcgattcttcttgtcgatgacgacagctcactactgaaacttctttctatgcgtctggaggccagtgggtataaagtcacctgtgccgatagtgctgagcgagccttagaattaatcaacgatcagttcgacctgctgatcacagacctgcgaatggaagggatggacgggatggccctgtttaatcaggtccagcgcctatacccgcaactccctgttgtcatcatcaccgcccacggatccatacctgaagcggtcaccgcaacacagcaaggtgtatttggttttctaaccaaacctatagatcgcgaccagcttttacagacgattagtgccgcactagccagtacaagccgttctctgggtaaatggcgtgagaatattatcagccgcagctctatcatggaaaacctgctggcagaagctgagcaaattgcagggtctgatgtcagtgtattagtcaccgggcccagcggtagtggtaaagaactgatggcaaatgcgatacataacgccagtcctcggcataaaaagccctttgtcgccatcaactgcggtgcactacctgaacaactgctggagtctgaactctttggccataccaaaggggcctttaccggcgcggttaataaacatgaaggattatttcaggcagctaatggaggcacgctgtttcttgatgagatcggtgatatgccaatgccacttcaggtgaagttgttacgggtattacaggagagacagatcaggcctgtcggtagtactgaaaccgtgcctgtcgatgtgaggataatctctgccactcaccgaaacctagaagaagccatgcttaacaatgacttccgggaagacctgttttatcgacttaacgtggtcaacctccatctccctccattatcagaacgccccgaggatattccgccccttgctcggcacttcgtagataaagcggctcaacgccataacccaaaggttaaaaacatctccagcgctgcccttcacgagctagcgcagtcggcatggcctggaaacgtcaggcagttagaaaatattattgagaaagtcaccgcactttcaacaacgccgattatctctgatagcgcggtaaaacgagcactggcgaatcaggaacaagtgattccgaattttaatgaagcccgtgcggaatttgagaaacgctatctgattaaggtgctacaaataacagagggaaatgtttctcaagcggctaaaattgcggggagaaaccgcactgatttctacaagctgctcaagaaacatgaattggaagcggcaaactttaaaggctga

SEQ ID NO: 157077 - protein, 439 aa, Neptuniibacter caesariensis
MNPAILLVDDDSSLLKLLSMRLEASGYKVTCADSAERALELINDQFDLLITDLRMEGMDGMALFNQVQRLYPQLPVVIITAHGSIPEAVTATQQGVFGFLTKPIDRDQLLQTISAALASTSRSLGKWRENIISRSSIMENLLAEAEQIAGSDVSVLVTGPSGSGKELMANAIHNASPRHKKPFVAINCGALPEQLLESELFGHTKGAFTGAVNKHEGLFQAANGGTLFLDEIGDMPMPLQVKLLRVLQERQIRPVGSTETVPVDVRIISATHRNLEEAMLNNDFREDLFYRLNVVNLHLPPLSERPEDIPPLARHFVDKAAQRHNPKVKNISSAALHELAQSAWPGNVRQLENIIEKVTALSTTPIISDSAVKRALANQEQVIPNFNEARAEFEKRYLIKVLQITEGNVSQAAKIAGRNRTDFYKLLKKHELEAANFKG

SEQ ID NO: 157078 - DNA, 1455 bp, Stigmatella aurantiaca DW4/3-1
  CDS (1)..(1455): transl_table=11
gtgaaccagcctaaacgcgccaagatcctcgtggtggacgatgaccccgtagtcctcaaggccgtcacctcgattctccagcgcgagggttaccccatcgtcgccatcgacgatgcggtcgagggactgacggcggccaaggatccgtccatcgacgtggccgtgttggacatcaacatgccccacctgtccggcatggacctgctcaaggccatcaaggccgagcggccggacgtggaggtcatcatgatgaccgcctatgccacggtggagaccgccgtggaggcggtgaaggccggggcgtatgactacctcaccaagccgttcgaggacatcgacgacctgagtctgaccgtcggcaaggcggccgagcgcaaggcgctcaaggaccggacgcgggccctggaggaggcgctcaccgcgcgcagccagttcgaggatctcatcggccagtcctcgcagatgcgcgccgtcttcaagctggtggagacggtgagccactccaccgccacggtgctcatccagggcgagagtggcacgggcaaggagctggtggcccgggccatccactaccgcagcgcgcgcaaggacaagcccttcgtggcggtcaattgttcggccctcacggagacgctgctggagagcgagctgttcggccacatgaagggggccttcacgggcgccaccggcaacaagaagggcctcttcgaggcggccgatggcggcaccatcttcctggacgagattggcgatgtgccgcccgccacccaggtgcgcctgttgcgcgtgctgcaggagggcgaggtgaagcgggtgggcgccaacgagccggtgaaggtggacgtgcgggtgattgccgccacccacgtggatctgacgcgcgccaaggagcagggccggttccgcgaggacctcttctatcgcctcaacgtcatcaccatcgatctgccgccgctccgggaccggccggaggatgtgccgctcctggcgcaccacttcctgaagctgtactcggccaagctggacaagaaggtggcgggcttcaccccccgcgcgatggaggcgctcaccgtgaaccggtggacgggcaacgtgcgcgagctggagaacgtcatcgagcgcgccgtggtgctcacctccaacgaggtgttggacgtggaggacttgcccccgggcttccaggaggccccgcaggctggctcgcccgtggaggtgttcagcctggcgcacctgccgtacgcccaggccaagcggctggccatgcgggcgttcgagcggcggtacctcaccgcgctgctggagaagaacaacaacaacgtctccagcgccgcccgcgccgcgggggtggaccgctccaacttccgccgcctgctcaagcagtacgaggtggctgggcgcaccatgaagcagcgcaaggcggatgggaacgacagctctccattagaggtggcctga

SEQ ID NO: 157079 - protein, 484 aa, Stigmatella aurantiaca DW4/3-1
MNQPKRAKILVVDDDPVVLKAVTSILQREGYPIVAIDDAVEGLTAAKDPSIDVAVLDINMPHLSGMDLLKAIKAERPDVEVIMMTAYATVETAVEAVKAGAYDYLTKPFEDIDDLSLTVGKAAERKALKDRTRALEEALTARSQFEDLIGQSSQMRAVFKLVETVSHSTATVLIQGESGTGKELVARAIHYRSARKDKPFVAVNCSALTETLLESELFGHMKGAFTGATGNKKGLFEAADGGTIFLDEIGDVPPATQVRLLRVLQEGEVKRVGANEPVKVDVRVIAATHVDLTRAKEQGRFREDLFYRLNVITIDLPPLRDRPEDVPLLAHHFLKLYSAKLDKKVAGFTPRAMEALTVNRWTGNVRELENVIERAVVLTSNEVLDVEDLPPGFQEAPQAGSPVEVFSLAHLPYAQAKRLAMRAFERRYLTALLEKNNNNVSSAARAAGVDRSNFRRLLKQYEVAGRTMKQRKADGNDSSPLEVA

SEQ ID NO: 157080 - DNA, 1350 bp, Alteromonadales bacterium TW-7
  CDS (1)..(1350): transl_table=11
atggccacaaatagtccgcacaaagcaaaagtgttattagttgatgacgatgcaagtttattaaagttacttgctattcgtattgaatcaaaaggctatcaagtaacaacttgtgaaagtggcttagcagcgctacaaattttaaaaagtcacgtgtttgatgtcgtaattaccgacttacgaatggatgaaatggacggcatggcgctgcatcgtcaactgcaaagccgataccctgcattaccagtaattatgatgacagcgcatggctctattcccgatgcggttgaagccactaaacaaggcatttttgccttcattactaaaccggtcgataaagacgagctatttgatagccttgcaaatgcaatagacattcacggtgtaaataccgatgaagccccatcaaaaagtaatatagtaacgcgcagtggtgccatgctgcacttgcttgaacaagttaagttacttgggcctactcacgttaatgtgcttatttcgggggccagtggaacgggtaaggagttattagcgcaggctattcatcagcatagccaagtaagtaacgggccctttgtggctataaattgtggtgctgtaccaggggagcttttagagtctgaattatttggccataaaaaaggagcgtttactggtgccgtaaaagatcatcaaggtttatttcagcaagcgcagggcggtacattatttttagatgaaattggcgatatgccccttaacttacaagtaaagttactgcgtgtactgcaagaaaaaaccattcgcccagtgggttttcaagaggagatctcaattgatgtgcgtattgtatcggcgactcacaaaaacttacctgaagccattaaaaaccagcagtttagagaagatttgtactaccgcctaaatgtggttaatttaaaattaccaccactgtgtgaacgccgtgaagacataagcctactagcccaatactttagcgcaagtatcgctaaacgaatgaaccaaaatgaaaaacattttgccaatgatgctatgcacgcattggtacgttatgattggccgggaaatattcgtcagttacaaaatgttgttgaacaagtggtagccttaacacccggtgaggttatttcagcgcatttagtattagcagcactcgatagcaacgaaaaaagtgtagagccactctcattaaacgacgctaaaaaagagtttgaacgtgattacgttattaatacgctaaaaatggcaggcggcaacgtagcagaaggcgccaagcttgctaagcgtaatcgttcagacttttataaactcattaaaaaacataatattgacgttgatactttggcgtaa

SEQ ID NO: 157081 - protein, 449 aa, Alteromonadales bacterium TW-7
MATNSPHKAKVLLVDDDASLLKLLAIRIESKGYQVTTCESGLAALQILKSHVFDVVITDLRMDEMDGMALHRQLQSRYPALPVIMMTAHGSIPDAVEATKQGIFAFITKPVDKDELFDSLANAIDIHGVNTDEAPSKSNIVTRSGAMLHLLEQVKLLGPTHVNVLISGASGTGKELLAQAIHQHSQVSNGPFVAINCGAVPGELLESELFGHKKGAFTGAVKDHQGLFQQAQGGTLFLDEIGDMPLNLQVKLLRVLQEKTIRPVGFQEEISIDVRIVSATHKNLPEAIKNQQFREDLYYRLNVVNLKLPPLCERREDISLLAQYFSASIAKRMNQNEKHFANDAMHALVRYDWPGNIRQLQNVVEQVVALTPGEVISAHLVLAALDSNEKSVEPLSLNDAKKEFERDYVINTLKMAGGNVAEGAKLAKRNRSDFYKLIKKHNIDVDTLA

SEQ ID NO: 157082 - DNA, 1542 bp, Plesiocystis pacifica SIR-1
  CDS (1)..(1542): transl_table=11
gtgacggagcccaagccacgagtcctcgtcgtcgacgacgaacccaaccttcgcaaagtcctcggagcgctgctgatgcagctcggctatgaggtcctgaccgagcccgacggggcctcggccctcgcccgggtcaagagcgcgccgcggggtaccttcgacgtcgtcatctccgacctgcgcatgccgaacatggacggcatggcgctgctcgaggcgctgaccgccgaggactccagcttgccggtgatcatcctgaccgcccacggcaccgtcgacaccgcggtccaggccgtcaagaagggcgccttcgacttcctcgagaagcccttcgagcgcgatcagatcgaccacctcgtcagcaaggcggtcaagacccgccggctcgcggggccgagcgccgagcccagctacgagctcgtccctgcagccgcgacgcccgaggccagctcgggcgaggcggcccaacccgaggcggggggccagttcggcatggtcggccgcagcccggccatggtcacggtcaagagcatgatcgggaccgtcgccgcgagcccctcgacggtgctgatcaccggcgagagcggcacgggcaaggagctcgtcgcccgggcgctgcacatgggctcggagcgcaaggacaagcccttcatccgggtcaactgcgcggccatccccgcgggcctggtcgagagcgagctctttggccacgagcgcggcgcgttcacgggcgccgtgtccagccgccagggtcgcttcgagctcgccgacggcggcaccttgttcctcgacgaggtctcggagatccccctcgagatccaggtcaagctgctgcgcgccatccaggagtcggagttcgagcgcgtcggcggggtcaagaccctgcgcgtggacgtgcggctgatcgccgcgaccaaccgcaacctcgaggacgagatcaaggacaagcgcttccgcgaggacctctactaccgcctcaacgtcgtgccgatccacctgccgcccctgcgcgagcgccccgaggacgtcgagcccctgctgcagcacttcctcgagcgctccaacgagcgcctgggcaaggccgtgaccggcttcacccccgaggccctcgaggccctcaaggcctactcgtggccgggcaacatccgcgagctcgagaacctcgtcgagcgcatggtgctgttcgccagcggcgaccgggtcagcgtcgacgagctgccggactcgttcaccgccgacggcgaggacgaggacggcgacgacgcgggcgccgagggcgaggtcgggctgccccgggcgatccgtctgcccctcgacagcctgggtctggatctcaaggaggcggtcaaggccggctcacggcgcatcgaagaggcgctgatccgcgaggcgctggcgcagaccgacgccaacgtgacccgctccgctcgcaagctcgggatctcccggcgctcgctccagtcgaagatgaaggagctcgggctgcgcgaggagatcgccaagcaaggcggcgtgtcgcccacgcctccgacggaggagtga

SEQ ID NO: 157083 - protein, 513 aa, Plesiocystis pacifica SIR-1
MTEPKPRVLVVDDEPNLRKVLGALLMQLGYEVLTEPDGASALARVKSAPRGTFDVVISDLRMPNMDGMALLEALTAEDSSLPVIILTAHGTVDTAVQAVKKGAFDFLEKPFERDQIDHLVSKAVKTRRLAGPSAEPSYELVPAAATPEASSGEAAQPEAGGQFGMVGRSPAMVTVKSMIGTVAASPSTVLITGESGTGKELVARALHMGSERKDKPFIRVNCAAIPAGLVESELFGHERGAFTGAVSSRQGRFELADGGTLFLDEVSEIPLEIQVKLLRAIQESEFERVGGVKTLRVDVRLIAATNRNLEDEIKDKRFREDLYYRLNVVPIHLPPLRERPEDVEPLLQHFLERSNERLGKAVTGFTPEALEALKAYSWPGNIRELENLVERMVLFASGDRVSVDELPDSFTADGEDEDGDDAGAEGEVGLPRAIRLPLDSLGLDLKEAVKAGSRRIEEALIREALAQTDANVTRSARKLGISRRSLQSKMKELGLREEIAKQGGVSPTPPTEE

SEQ ID NO: 157084 - DNA, 1392 bp, Desulfatibacillum alkenivorans AK-01
  CDS (1)..(1392): transl_table=11
atgaaaagacgcctgctcatagtggatgacgagcccgacatgctccacctgctcaaacgcagcctggagccggatctgaactgcgtcgtggaaaccgccgcctccggcctggaagccatggaaattctggggcaggagcggttcgacctcatcctggcggatatcaaaatgcccaaaatggacggcctggagcttttggaaaaggtgcaggcccaatatccggaccagaccatggtcatgatgaccggacacggaagcattgacgtggccgttcaggccatccaaaaaggcgcctacgattttgtgaccaaaccctttgatcacgaagccctggtggtgcgcctggaaaaagccctggaacgcagcaagctgatcgcggaaaaccgccgactcgtccgctggtgcggccagcaacgcgcctttgaaaatatggtgggccaaagcccggccatgcaaacggtgttcgacaccatcaagaccgtctcccagaccgacatgaccgtgctcatcaccggcgagtcaggcacgggcaaggaactggccgcccgggctatccattccctcagtccccgatcctccggcccttttgtggccatcaactgccccacggtgccggaaaacatcctggaaagcgagttgttcggatataaaaaaggcgccttcacccacgcctcgaccagccgccagggtctttttgaggaagccaacggaggcactttgttcctggacgaaatcggggacgtgacgccctccatccagaccaagctgctgcgggttttgcaggaaaaggaaatcaagccgttgggctccaacaaatccaggaaggtgaacgtgcgcattgtggcgtccaccaaccaggatttgcaaaagcgcattgacgaaggcctgttccgggaggatttttactatcgcctggccgtggtgccggtggtcatgccgcccctgcgggagcgcaacggcgacgtaccgctcatcgccgcccatctggcggccaagcattgcaaggatctgggcaaactgcccgtgaccttgtctccgaactttgtaaactggctggaaaatcagacctggacgggcaacgtgcgggagttggaaaacaccatcattcaggccattttgttttcggagggaggaacgctcgagccgcccaagaccgctcccgccgcaacacagaccttgtccaggatttccgtcccggacctgtccgcccaatcttacaaggaagccaaggaaagcatcctggaggcttttcacagaaattacctgggcgccctgctcaaggaaaccggaggcaacgtgacccaggccgccaagaattgcggcatggagcgccagaatctccagcaaatcctccgccgctacaacatttccgcccaggatttcagggattaa

SEQ ID NO: 157085 - protein, 463 aa, Desulfatibacillum alkenivorans AK-01
MKRRLLIVDDEPDMLHLLKRSLEPDLNCVVETAASGLEAMEILGQERFDLILADIKMPKMDGLELLEKVQAQYPDQTMVMMTGHGSIDVAVQAIQKGAYDFVTKPFDHEALVVRLEKALERSKLIAENRRLVRWCGQQRAFENMVGQSPAMQTVFDTIKTVSQTDMTVLITGESGTGKELAARAIHSLSPRSSGPFVAINCPTVPENILESELFGYKKGAFTHASTSRQGLFEEANGGTLFLDEIGDVTPSIQTKLLRVLQEKEIKPLGSNKSRKVNVRIVASTNQDLQKRIDEGLFREDFYYRLAVVPVVMPPLRERNGDVPLIAAHLAAKHCKDLGKLPVTLSPNFVNWLENQTWTGNVRELENTIIQAILFSEGGTLEPPKTAPAATQTLSRISVPDLSAQSYKEAKESILEAFHRNYLGALLKETGGNVTQAAKNCGMERQNLQQILRRYNISAQDFRD

SEQ ID NO: 157086 - DNA, 1428 bp, Thauera sp. MZ1T
  CDS (1)..(1428): transl_table=11
atgagcacgtcgacggagatgcacgcgaccgcggcggcggcaccggcgcgcctgctggtggtcgacgacgacgccgacctgctgcgcctgctcgcgatgcgcctgcaggccaccggctacgacgtcgccaccgcggacagcgtcgcggccgcacgcagccgtctcggcgtggagcgcttcgacctcgtggtgagcgacgtgcgcctgcccgacggcgacggactcgccctgttcgaggacatccgccgccagcatccggcgctgccggtcatcctgctcaccgcgcacggcaccatccccgatgcggtcgaggccaccgcgctcggggtcgccggttatctcaccaagcccttcgacagccaggccctgctgcagggcatccgccaggccctgcaacgcgccggccccacccacgcccgcagcggtctccgcgccgacgcccccggcagcgccggcgacacggcctggcgcgcagcgatcctcagccgcagcagccgcatgcaggcagtcctcgacgaggcccgtctggtcgccgccgcggacgccagcgtgctgatccgcggtgacagcggcaccggcaaggagctgctcgcacgcgcgatccacctcgccagcccgcgcgccgctgcgcccttcgtcgcgatcaactgcggcgccattcccgagccgctgctcgaatccgagctcttcggccacgtgcgcggcgccttcaccggcgccaccagcgcccatcagggcctggtgcaggccgcccacggcggcacactcttcctcgacgagatcggcgacatgccgcccgcgctgcaggtcaagctgctgcgcgtgctgcaggagcgcgccgtgcgtccggtgggtgcgacgcgcgcgcaggcggtcgacctgcgcatcgtctccgccacccaccgcgacctcgacgcggcgctggccgcgggccagttccgcgcggacctctactaccgcatcgacgtggtgagcctgcagctgcccaccctggccgagcgccgcgaggacatcccgctgctcgccgggcacttcctgcgcagcctcgcgcacaagtacggcaggcgcctcaccggcttcgcgcccgaagcgctggaggcactcgccaccgcgccgtggccgggcaacgtgcgccagctccacaacgtggtcgagcaggcgtgcgcgctcgccaccacggcgctgatcccgcgcgccctggtcgaacgcgccctgcgcgtgcagccggccgaggccctcggctacgccgaggcgaagcgccgcttcgagcgaaactatctgatacagctgctgaaactgactgcgggtaatgtttcggacgctgcacggctggcggagcgcaatcgcaccgagttctaccgcctgctgcagcggcacgacctgacgcccgagctcttccgcggcgccggccccgatgtcgaacaatga

SEQ ID NO: 157087 - protein, 475 aa, Thauera sp. MZ1T
MSTSTEMHATAAAAPARLLVVDDDADLLRLLAMRLQATGYDVATADSVAAARSRLGVERFDLVVSDVRLPDGDGLALFEDIRRQHPALPVILLTAHGTIPDAVEATALGVAGYLTKPFDSQALLQGIRQALQRAGPTHARSGLRADAPGSAGDTAWRAAILSRSSRMQAVLDEARLVAAADASVLIRGDSGTGKELLARAIHLASPRAAAPFVAINCGAIPEPLLESELFGHVRGAFTGATSAHQGLVQAAHGGTLFLDEIGDMPPALQVKLLRVLQERAVRPVGATRAQAVDLRIVSATHRDLDAALAAGQFRADLYYRIDVVSLQLPTLAERREDIPLLAGHFLRSLAHKYGRRLTGFAPEALEALATAPWPGNVRQLHNVVEQACALATTALIPRALVERALRVQPAEALGYAEAKRRFERNYLIQLLKLTAGNVSDAARLAERNRTEFYRLLQRHDLTPELFRGAGPDVEQ

SEQ ID NO: 157088 - DNA, 1335 bp, Escherichia albertii TW07627
  CDS (1)..(1335): transl_table=11
atgagccataaatcagcgcatttattattggttgatgacgaccctgggttactgaaattacttggtcttcgcttgatcagcgagggctacagcgtggtcacggcggaaagcggcgctgaggggctgagagtactcaatcgcgaaaaagtggatttggtgatcagcgatttgcgcatggatgaaatggacggcatgcagttgtttgctgaaatccagaaagtgcagccgggaatgccggtaattatcctcaccgcgcatggctccattcccgatgccgttgctgcaacacagcagggtgtgtttagtttcctgactaaacccgttgataaagacgcgctgtatcaggcgattgacgatgcgctggagcaatccgcgccagccactgatgaacgttggcgtgaggcgatagtcacccgcagtccgctaatgttgcgtttgctggaacaggcgcggctggtggcgcagtcagatgttagcgttttgattaatggtcagagcggcaccgggaaagagatttttgcccaggctatccacaacgccagtccgcgcaacggcaaaccgtttattgctattaactgtggcgcattgcctgagcagttgctggaatcagaactgttcggtcatgcacgcggcgcgtttactggcgcggtcagcaatcgcgaaggcttatttcaggcagcggaaggcggtacgctgtttctcgatgagattggcgacatgcccgcgccgttgcaggtcaaactgctgcgtgtattgcaggagcgtaaagtccgtccgttagggagcaaccgcgatattgatattgacgtgaggattatttccgcaactcaccgtgacctgccaaaagcaatggcgcgtggagagttccgtgaggatctctattaccgcctcaacgtcgtcagcctgaaaattccgacactggcggagcgcacggaagatattcccctactggcaaaccatttgttgcgccaggcggcagagcgacataaaccgtttgtccgcgcgttctccaccgatgcaatgaagcgtctgatggccgccgcctggccgggtaatgtgcgccagttggtcaacgtgattgaacagtgcgtggcgctgacttcatcgccagtgattagcgatgcgctggtggagcaggcgctggagggcgaaaatacggcgctgccaacttttgttgaggcgcgtaatcaatttgagctcaactacttgcgtaagctgctgcaaattaccaaaggcaacgtcactcatgcggcgagaatggcggggcgcaaccggacagaattttataaactgctttcccgacacgagctggatgcaaacgatttcaaggaatga

SEQ ID NO: 157089 - protein, 444 aa, Escherichia albertii TW07627
MSHKSAHLLLVDDDPGLLKLLGLRLISEGYSVVTAESGAEGLRVLNREKVDLVISDLRMDEMDGMQLFAEIQKVQPGMPVIILTAHGSIPDAVAATQQGVFSFLTKPVDKDALYQAIDDALEQSAPATDERWREAIVTRSPLMLRLLEQARLVAQSDVSVLINGQSGTGKEIFAQAIHNASPRNGKPFIAINCGALPEQLLESELFGHARGAFTGAVSNREGLFQAAEGGTLFLDEIGDMPAPLQVKLLRVLQERKVRPLGSNRDIDIDVRIISATHRDLPKAMARGEFREDLYYRLNVVSLKIPTLAERTEDIPLLANHLLRQAAERHKPFVRAFSTDAMKRLMAAAWPGNVRQLVNVIEQCVALTSSPVISDALVEQALEGENTALPTFVEARNQFELNYLRKLLQITKGNVTHAARMAGRNRTEFYKLLSRHELDANDFKE

SEQ ID NO: 157090 - DNA, 1341 bp, Providencia stuartii ATCC 25827
  CDS (1)..(1341): transl_table=11
atgaccaaccgtaaatcagcaaatcttctgctggtggatgatgatcctagtctgctgaaattactgggtatgcgcttaagcagtgaaggttttaaagtcaccaccgcggaaagtgggccagaagcgctaaaattgcttcaaaaagaaaaaatagagttggtgattagtgacttgcgaatggatgaaatggatggaatggctctgttcgatgagatccagaagcaacaccctaatttacccgtgataatcctcaccgcccatggctcaattcccgacgccgttgcagcaacacagcgcggcgtatttagtttcctaaccaaacctgttgataaagatgcgctctacaaggccattgatgaagcattggcattatcttcaacaccaatcagtgatgaagagtggagtgaaggcattgttacccgcagcccgttgatgatccgactgttagaacaagcccatatggtcgcgcaatcggatgtgagcgtattaattaatgggcagagtggtacaggtaaagaggtcttagcacaggcaatccataaggcaagcccacgggcacgcaaaccattcatcgcgattaactgcggcgcattaccagaacaattacttgaatctgagctatttggccatgcaaaaggggcctttacaggggctgtgagtagccgagaagggctattctttgccgcaaatggtggaacgctatttcttgatgaaatcggcgatatgccaatgccgctacaagttaaattattacgcgtattacaagagcgcaaggtacgtcctcttggcagtaatcgtgatttagatattgatgtgcgtattatctctgcaacacaccgtaatttaccgaaggcgatggaaaaaaatgagtttcgtgaagacctctattatcgtctgaatgtggtgaatttgcgcatcccagccctgaatgagagagcggaagatatacctattttagctaaccatttactacgtgaatcggcatctaggcataagccgtttgttcgtagcttctcgacagaagctatgaagtgtttgatgtcagccagttggccgggcaacgtacgtcaattggttaacgtcattgagcaatgcgtcgcattgactacaacacctgtgatcagtgaagcgttggttagccaagcgttacaaggtgaaaatacggcacttccaacgtttgttgaggcacgtaaccaatttgagcttaactatctacgtaaactattacagatgacaaaagggaatgtgacacaagccgctcgcatggcaggcagaaatcgtactgaattttataaattattggcacgtcatgatttagaggctaatgattttaaagaataa

SEQ ID NO: 157091 - protein, 446 aa, Providencia stuartii ATCC 25827
MTNRKSANLLLVDDDPSLLKLLGMRLSSEGFKVTTAESGPEALKLLQKEKIELVISDLRMDEMDGMALFDEIQKQHPNLPVIILTAHGSIPDAVAATQRGVFSFLTKPVDKDALYKAIDEALALSSTPISDEEWSEGIVTRSPLMIRLLEQAHMVAQSDVSVLINGQSGTGKEVLAQAIHKASPRARKPFIAINCGALPEQLLESELFGHAKGAFTGAVSSREGLFFAANGGTLFLDEIGDMPMPLQVKLLRVLQERKVRPLGSNRDLDIDVRIISATHRNLPKAMEKNEFREDLYYRLNVVNLRIPALNERAEDIPILANHLLRESASRHKPFVRSFSTEAMKCLMSASWPGNVRQLVNVIEQCVALTTTPVISEALVSQALQGENTALPTFVEARNQFELNYLRKLLQMTKGNVTQAARMAGRNRTEFYKLLARHDLEANDFKE

SEQ ID NO: 157092 - DNA, 1326 bp, Escherichia coli 53638
  CDS (1)..(1326): transl_table=11
atgacgcacgataatatcgatattctggtggtggatgatgacattagccactgcactattttgcaggctttactgcgcggctggggctataacgtcgcgctggcgaacagcgggcgacaggcgctggagcaggtgcgggagcgagtttttgatcttgtgctttgcgatgtgcgaatggcggagatggacggcattgccacgctaaaagagatcaaagcgttaaatccggcgattccggtactgattatgaccgcatactccagcgtcgagacggcggtagaggcactgaaaaccggggcgctggattatctcatcaagccgctggatttcgataacctacaggcgacgctggaaaaggcgctcgcgcatacgcacagtattgatgctgaaacacctgcggtgactgccagccagttcggtatggtcggtaaaagcccggcgatgcaacacctgctcagtgaaatcgccctcgtcgcgccatcggaagccacggtgctgatccacggcgattccggcaccggtaaagagctggtcgccagggcgattcacgccagtagcgcacgtagcgaaaaaccgctggtaacgctcaactgtgcggcactcaacgaatccttgctggaatctgaattgttcggtcacgaaaaaggggcgtttactggagccgataaacgccgggaagggcgctttgttgaggcggacggcggcacgctgtttctcgatgaaattggcgatatctcgccgatgatgcaggtgcgtctgctgcgtgcgattcaggagcgcgaagttcagcgtgtcggtagcaaccagattatctcggttgatgtccggctgattgcggcgacccatcgcgatcttgccgcagaggtgaatgccgggcgttttcgccaggatctctactatcgcctgaatgtggtggcgattgaagtaccatcgctgcggcaacggcgggaagatatccctctgctggctggccattttctgcagcgctttgccgagcgtaatcgcaaggcggtaaaaggttttacgccccaggcgatggatctgttgattcattacgactggccgggaaatattcgtgagctggaaaacgcggtggaacgggcagtggtgctgctgaccggggaatatatttccgaacgcgagctgccgctggcgattgccagtacgccgatcccgctgggacaaagtcaggatattcagccgttggtggaagtggaaaaagaggtgattctggcggcgctggagaaaacgggcggcaacaaaaccgaagccgcccgtcagttagggatcacgcgcaaaacgctattggcaaaactgtcgcgttag

SEQ ID NO: 157093 - protein, 441 aa, Escherichia coli 53638
MTHDNIDILVVDDDISHCTILQALLRGWGYNVALANSGRQALEQVRERVFDLVLCDVRMAEMDGIATLKEIKALNPAIPVLIMTAYSSVETAVEALKTGALDYLIKPLDFDNLQATLEKALAHTHSIDAETPAVTASQFGMVGKSPAMQHLLSEIALVAPSEATVLIHGDSGTGKELVARAIHASSARSEKPLVTLNCAALNESLLESELFGHEKGAFTGADKRREGRFVEADGGTLFLDEIGDISPMMQVRLLRAIQEREVQRVGSNQIISVDVRLIAATHRDLAAEVNAGRFRQDLYYRLNVVAIEVPSLRQRREDIPLLAGHFLQRFAERNRKAVKGFTPQAMDLLIHYDWPGNIRELENAVERAVVLLTGEYISERELPLAIASTPIPLGQSQDIQPLVEVEKEVILAALEKTGGNKTEAARQLGITRKTLLAKLSR

SEQ ID NO: 157094 - DNA, 1326 bp, Escherichia coli E110019
  CDS (1)..(1326): transl_table=11
atgacgcacgataatatcgatattctggtggtggatgatgacattagccactgcactattttgcaggctttactgcgcggctggggctataacgtcgcgctggcgaacagcgggcgacaggcgctggagcaggtgcgggaacaggtttttgatcttgtgctttgcgatgtgcgaatggcggagatggacggcatcgccacgctgaaagagatcaaagcgttaaacccggcaattccggtgctgattatgactgcgtactccagcgtcgagacggcggtagaggcactgaaaactggggcgctggattatctcatcaagccgctggatttcgataacctacaggcgacgctggaaaaggcgctcgcgcatacgcacagtattgatgctgaaacacctgcggtgactgccagccagttcggtatggtcggtaaaagcccggcgatgcaacacctgctcagtgaaatcgccctcgtcgcgccatcggaagccacggtgctgatccacggcgattccggcaccggtaaagagctggtcgccagggcgattcacgccagtagcgcacgtagcgaaaaaccgctggtaacgctcaactgtgcggcactcaacgaatccttgctggaatctgaattgttcggtcacgaaaaaggggcgtttaccggagccgataaacgccgggaagggcgctttgttgaggcggacggcggcacgctgtttctcgatgaaattggcgatatctcgccgatgatgcaggtgcgtctgctgcgtgcgattcaggagcgcgaagttcagcgtgtcggtagcaaccagactatctcggttgatgtccggctgattgcggcgacccatcgcgatcttgccgcagaggtgaatgccgggcgttttcgccaggatctctactatcgcctgaatgtggtggcgattgaagtaccatcgctgcggcaacggcgggaggatatccctctgctggctagccattttcttcagcgttttgccgagcgtaatcgcaaggcggtaaaaggctttacgccacaggcgatggatttgctgatccactacgactggccgggaaacattcgtgaactggaaaacgcggtggaaaggtcggtggtgctgctgaccggggaatatatttccgaacgcgagctgccgctggcgattgccagtacgccgatcccgctggggcaaagtcaggatattcagccgttggtggaagtagaaaaagaggtgattctggcggcgctggagaaaacgggcggcaacaaaaccgaagccgcccgtcagttagggatcacgcgcaaaacgctattggcaaaactgtcgcgttag

SEQ ID NO: 157095 - protein, 441 aa, Escherichia coli E110019
MTHDNIDILVVDDDISHCTILQALLRGWGYNVALANSGRQALEQVREQVFDLVLCDVRMAEMDGIATLKEIKALNPAIPVLIMTAYSSVETAVEALKTGALDYLIKPLDFDNLQATLEKALAHTHSIDAETPAVTASQFGMVGKSPAMQHLLSEIALVAPSEATVLIHGDSGTGKELVARAIHASSARSEKPLVTLNCAALNESLLESELFGHEKGAFTGADKRREGRFVEADGGTLFLDEIGDISPMMQVRLLRAIQEREVQRVGSNQTISVDVRLIAATHRDLAAEVNAGRFRQDLYYRLNVVAIEVPSLRQRREDIPLLASHFLQRFAERNRKAVKGFTPQAMDLLIHYDWPGNIRELENAVERSVVLLTGEYISERELPLAIASTPIPLGQSQDIQPLVEVEKEVILAALEKTGGNKTEAARQLGITRKTLLAKLSR

SEQ ID NO: 157096 - DNA, 1335 bp, Shigella dysenteriae 1012
  CDS (1)..(1335): transl_table=11
atgagccataaacctgcgcatttattattggtcgatgacgatccgggattgctgaaactgcttggcctgcgcctgaccagcgaaggctacagcgtggtcacggcggagagtggcgttgaaggattacgggtactgaatcgcgaaaaagtagatttagtcatcagcgacctgcggatggatgaaatggatggtatgcagctgtttgctgaaattcagaaagtgcagccaggaatgccggtaattatccttaccgcgcatggttctattcccgatgccgttgcagcaacacagcagggtgtttttagtttcctcaccaagcctgtcgataaagacgcgctatatcaggcaattgacgatgcgctggaacaatccgcgccagccaccgacgaacgctggcgcgaggcgattgtcacccgcagcccgctgatgctgcgtttgctggaacaggcgcggctggtggcgcaatcagacgtcagcgtgctgattaatgggcagagcggcaccgggaaagagattttcgcccaggctatccacaacgccagcccgcgcaatagcaaaccatttattgctattaactgtggtgcattgcctgagcaattgctggagtcggagctgtttggtcatgcgcgtggcgcgtttactggcgctgtcagcaatcgcgaaggtttattccaggcggcggaaggcggaacgctatttctcgatgagattggcgatatgcctgcgccgttgcaggtcaaactgttgcgcgtgttgcaggagcgtaaagtgcgcccgctgggcagtaaccgcgatattgatatcaatgtgcggattatttctgccactcaccgtgatctgccaaaagcgatggcgcgcggggaattccgcgaagatctctattaccgcctcaacgttgtcagcctgaaaattccggcactggcggagcgcacagaagacattccgctactggcaaatcacctgttgcgccaggcggcagagcgacataaaccgtttgtccgcgcgttctctaccgatgcgatgaaacgcctgatgaccgcgagctggccgggtaatgtgcgccagttggtcaacgtgattgaacagtgcgtggcgctgacctcatctccggtgattagtgatgcattagtagagcaggcgctggagggtgaaaatacggcgctgccaacctttgttgaggcacgtaatcagtttgaactcaactatttgcgtaagctgctgcaaatcaccaaaggcaacgtcacccacgcggcgagaatggcggggcgcaaccggacagaattttataaactgctttcccgacacgagctggatgcaaacgatttcaaggaatga

SEQ ID NO: 157097 - protein, 444 aa, Shigella dysenteriae 1012
MSHKPAHLLLVDDDPGLLKLLGLRLTSEGYSVVTAESGVEGLRVLNREKVDLVISDLRMDEMDGMQLFAEIQKVQPGMPVIILTAHGSIPDAVAATQQGVFSFLTKPVDKDALYQAIDDALEQSAPATDERWREAIVTRSPLMLRLLEQARLVAQSDVSVLINGQSGTGKEIFAQAIHNASPRNSKPFIAINCGALPEQLLESELFGHARGAFTGAVSNREGLFQAAEGGTLFLDEIGDMPAPLQVKLLRVLQERKVRPLGSNRDIDINVRIISATHRDLPKAMARGEFREDLYYRLNVVSLKIPALAERTEDIPLLANHLLRQAAERHKPFVRAFSTDAMKRLMTASWPGNVRQLVNVIEQCVALTSSPVISDALVEQALEGENTALPTFVEARNQFELNYLRKLLQITKGNVTHAARMAGRNRTEFYKLLSRHELDANDFKE

SEQ ID NO: 157098 - DNA, 1326 bp, Shigella dysenteriae 1012
  CDS (1)..(1326): transl_table=11
atgacgcacgataatatcgatattctggtggtggatgatgacattagccactgcactattttgcaggctttactgcgcggctggggctataacgtcgcgctggcgaacagtgggcgacaggcgctggagcaggtgcgggagcgggtttttgatcttgtgctttgcgatgtgcgaatggcggagatggacggcattgccacgctaaaagagatcaaagcgttaaatccggcgattccggtactgattatgaccgcgtactccagcgtcgagacggcggtagaagcgttgaaaaccggggcgctggattatctcatcaagccgctggatttcgataacctgcaggcgacgctggaaaaggcgctcgcgcatacgcacagtattgatgctgaaacgcctgcggtgactgccagccagttcggtatggtcggtaaaagcccggcgatgcaacacctgctcagtgaaatcgccctcgtcgcgccatcggaagccacggtgctgatccacggcgattccggcaccggtaaagagctggtcgccagggcgattcacgccagtagcgcacgtagcgaaaaaccgctggtaacgctcaactgtgcggcactcaacgaatccttgctggaatctgaattgttcggtcacgaaaaaggggcgtttactggagccgataaacgccgggaagggcgctttgttgaggcggacggcggcacgctgtttctcgatgaaattggcgatatctcgccgatgatgcaggtgcgtctgctgcgtgcgattcaggagcgtgaagttcagcgtgtcggtagcaaccagactatctcggttgatgtccggctgattgcggcgacccatcgcgatcttgccgcagaggtaaaggccgggcgttttcgccaggatctctactatcgcctgaacgtggtggcgattgaagtaccgtcgctgcggcaacggcgggaggatatccctctgctggctggccattttcttcagcgctttgccgagcgtaatcgcaaggcggtaaaaggctttacgccacaggcgatggatttgctgatccactacgactggccgggaaatattcgtgaactggaaaacgcggtggaacgggcggtggtgctgctgaccggggaatatatttccgaacgcgagctgccgctggcgattgccggtacgccgatcccgctggggcaaagtcaggatattcagccgctggtggaagtcgaaaaagaagtgattctggcggcactggagaaaacgggcggcaacaaaaccgaagccgcccgtcagttagggatcacgcgcaaaacgctattggcaaaactgtcgcgttag

SEQ ID NO: 157099 - protein, 441 aa, Shigella dysenteriae 1012
MTHDNIDILVVDDDISHCTILQALLRGWGYNVALANSGRQALEQVRERVFDLVLCDVRMAEMDGIATLKEIKALNPAIPVLIMTAYSSVETAVEALKTGALDYLIKPLDFDNLQATLEKALAHTHSIDAETPAVTASQFGMVGKSPAMQHLLSEIALVAPSEATVLIHGDSGTGKELVARAIHASSARSEKPLVTLNCAALNESLLESELFGHEKGAFTGADKRREGRFVEADGGTLFLDEIGDISPMMQVRLLRAIQEREVQRVGSNQTISVDVRLIAATHRDLAAEVKAGRFRQDLYYRLNVVAIEVPSLRQRREDIPLLAGHFLQRFAERNRKAVKGFTPQAMDLLIHYDWPGNIRELENAVERAVVLLTGEYISERELPLAIAGTPIPLGQSQDIQPLVEVEKEVILAALEKTGGNKTEAARQLGITRKTLLAKLSR

SEQ ID NO: 157100 - DNA, 1359 bp, Thioalkalivibrio sp. HL-EbGR7
  CDS (1)..(1359): transl_table=11
atggccgaggccgcacgcatcctgctggtggacgatgacgagggtctgctgcgcctgctttccctgcgcctgagcgcggcgggctaccaggtgaagaccgtgaccagcgcagagcaggcgctcgcgacgctgccccattaccagccccgcctggtgatcaccgacctgcgcatgggcggcatggacggcatgaccctgttcgagaccgtgcacaaggatcagccggccctgcccatcatcatcctcaccgcccacggcaccatccccgatgccgtggaggccacccggcgcggcgtgttcggttttctcaccaagcccttcgacagccaggccctgctggactacgtgtcccaggccctgcggctggcgggcccgggccaggaggcgggcggcgacgaggccgtggccggcgactggcgagagggcatcatcagccgcagcgcggtgatggaggaggccctgcgccaggcgcgcctggtggccgacagcgaaaccaacgtgctcatccagagcgagagcggtaccggcaaggagctgctggcccgtgccctgcaccgggccagccggcgagccgggaggcccttcgtggcggtcaactgcagcgccatccccgaggccctgctggagtcggagctgttcggccacagcaagggggccttcaccggcgccacccagaaccgcaaggggctgttcgaggccgccaacggcggcaccctgttcatggacgaggtgggtgacatgccgctgcccttccaggccaagctgctgcgcgtgctgcaggagggcgaggtgcggccggtgggggccaacagttcggtgcccgtggacgtgcgcgtgatctccgccacccaccgggacctggagcaggcggtggccgacggggatttccgcgccgacctctactacaggctcaacgtggtgcgcctggacctgccgccgctgcgcgagcgccgggacgacatcccgctgctggtgcgcttcttcctggaccgggtcaacgagcgcaacggccggcgcgtcgagggcttcgcccccgaggccatggaggcgctcatggccgcctcctggcccggcaacgtgcgccagctgcagaacgtggtggagcagtccgcggccctgtgcaccacggagatcgtgcccctgagcctggtacagcgcgccctgcgcagcgaccccagcgagatcccgcccctggccgaggcccgggaccgcttcgagcgggagtacctggaggaactgctgcgcatcaccggcggcaacgtcagcagcgccgcgcggctcgccggccgcaaccgcaccgagttctacaagctgctcaagcgccatcacctggagccggagatgttccgcgcctcctga

SEQ ID NO: 157101 - protein, 452 aa, Thioalkalivibrio sp. HL-EbGR7
MAEAARILLVDDDEGLLRLLSLRLSAAGYQVKTVTSAEQALATLPHYQPRLVITDLRMGGMDGMTLFETVHKDQPALPIIILTAHGTIPDAVEATRRGVFGFLTKPFDSQALLDYVSQALRLAGPGQEAGGDEAVAGDWREGIISRSAVMEEALRQARLVADSETNVLIQSESGTGKELLARALHRASRRAGRPFVAVNCSAIPEALLESELFGHSKGAFTGATQNRKGLFEAANGGTLFMDEVGDMPLPFQAKLLRVLQEGEVRPVGANSSVPVDVRVISATHRDLEQAVADGDFRADLYYRLNVVRLDLPPLRERRDDIPLLVRFFLDRVNERNGRRVEGFAPEAMEALMAASWPGNVRQLQNVVEQSAALCTTEIVPLSLVQRALRSDPSEIPPLAEARDRFEREYLEELLRITGGNVSSAARLAGRNRTEFYKLLKRHHLEPEMFRAS

SEQ ID NO: 157102 - DNA, 1338 bp, Enterobacter cancerogenus ATCC 35316
  CDS (1)..(1338): transl_table=11
atgacaagccgtaaacctgcccatctcctgctggtggatgacgatcccgggctgttaaaactgctggggatgcgtctggtcagtgaaggctacaccgtggtgactgccgaaagcggccaggaagggctaaaagtcctctcccgcgagaagatcgatctggtcatcagcgatttacggatggacgagatggacggcatgcagctgttcgccgagatccagaagcagcagccgggaatgccggtgattatcctcaccgcgcacggctcgataccggacgctgtggccgcaacgcagcagggggtgttcagcttcctgaccaaaccggtggataaagatgcgctgtataaggccatcgacagcgcgcttgaacatgccgcgccttccggtgatgaaacctggcgtgaatccatcgtgacgcgcagccctgttatgctgcgcctgctcgaacaggcgcggatggtggcgcaatctgacgtcagcgttctgattaacggccagagcggaaccgggaaggagatcctggcgcaggcgatccacaatgccagtccgcgcagcaaaaatgcctttattgccattaactgcggcgcgctgccggagcaactgctggaatccgaactctttggtcacgcgcgcggtgcctttaccggcgcggtcagcagccgggaagggctcttccaggcggcggaaggcggcacgctgtttcttgatgagattggcgatatgcccgcgccgctgcaggttaaactgctgcgtgtgctgcaggaacgcaaagttcgcccgcttggcagtaaccgggatatcgacatcaacgtgcgcatcatctctgcaacccaccgtgatttgccgaaggtgatggcgcgcaacgagtttcgtgaagatctctattaccgcctgaacgtcgtgaacctgaaaattccggcgctggccgagcgagcggaagatatcccgctgctggcgaaccatctgctgcgccagtccgccgatcgtcataaaccttttgtgcgggccttttccaccgatgcgatgaaacgtctgatgaccgcaagctggccgggcaacgtccgtcagctggtaaacgtcattgagcagtgcgtggcgttgacgtcgtcgccggtcattagcgatgcgctggtagggcaggcgctggaaggggaaaacacggcgctgcccaccttcgcggaagcgcgcaatcagttcgaactcaattatctgcgcaagcttttgcaaatcactaagggcaacgtgacccacgcggcgcgcatggccggacgcaaccgtaccgagttctacaagctgctgtcacgccacgagctggaagcgaacgattttaaagagtag

SEQ ID NO: 157103 - protein, 445 aa, Enterobacter cancerogenus ATCC 35316
MTSRKPAHLLLVDDDPGLLKLLGMRLVSEGYTVVTAESGQEGLKVLSREKIDLVISDLRMDEMDGMQLFAEIQKQQPGMPVIILTAHGSIPDAVAATQQGVFSFLTKPVDKDALYKAIDSALEHAAPSGDETWRESIVTRSPVMLRLLEQARMVAQSDVSVLINGQSGTGKEILAQAIHNASPRSKNAFIAINCGALPEQLLESELFGHARGAFTGAVSSREGLFQAAEGGTLFLDEIGDMPAPLQVKLLRVLQERKVRPLGSNRDIDINVRIISATHRDLPKVMARNEFREDLYYRLNVVNLKIPALAERAEDIPLLANHLLRQSADRHKPFVRAFSTDAMKRLMTASWPGNVRQLVNVIEQCVALTSSPVISDALVGQALEGENTALPTFAEARNQFELNYLRKLLQITKGNVTHAARMAGRNRTEFYKLLSRHELEANDFKE

SEQ ID NO: 157104 - DNA, 1416 bp, Leptospirillum sp. Group II UBA
  CDS (1)..(1416): transl_table=11
atgacgcacgagacccccgaagccctctccttccaaccatcgatcctgatcgtggacgacgatccggtcgtgctgaagcagatgacgtggctgttcaagggagagtatcccgtcctgaccgccgacagcgcctcctccgccattgagatctttgtccgggagaaacctccggtcgcgatcctcgatctgtcgcttggcaaggactccgggcaggacggcatcgatcttctccgctttttcgccgaagccgacccgcattttcacgggatcatcctgagcggatccatcgaccggccccgggcgctggaggcggttcgcctcggcgcttacgaccttctcgacaaatccgtcgaccccgaagagctgaaacgggtggtgggccgggcctgcaaccgggctcttctttcccggactcccgcccgcccgaaagaattatccccctctgccgaggagtccaatccatttccgggcatcgtcacaaaaaatcccggcatgaaggagatgctccggatcttgcaaaagatcagcgccacggacgtgtcggttctgatcacgggagagagtggaacgggcaaagagttgttcgcccgggccatccatgaacgaagcccccgcaagaatgggcctttcgtcgccatcaattgcggcgccattccggagagccttctcgaaagcgaactgttcgggcatgagaaaggagcgtttacgggagcgacggaaagccgggccggaaaattcgaagccgcccatcacggaacgctctttttggatgaagtggccgaacttcagatcgaacttcaggtgaagcttctgcgggtcttgcaggacaagatcgtcgaacgggtcggaagccggaacggaaagcagctcgacgtgcggatcatcgccgccaccaaccagccactgaacgagctgatggcccggggacgctttcgggaagacctctattaccgtttgtccgtcatgagcttccatcttccacctcttcgggaccggggagaagatgtcctcctcctggcccagcactttctggagaagtttcggacggaatacaacaaaccccaggtgatcgacttcaacagggagtgtctggacgtcatccggaaacacgactggccgggaaacatccgggagctcgaaaaccggatccagagggcggtgatcatcgccagcgggaaatgggtcacccgggaggatctcgatatcggtctcgactccagaaaacatggagaaagcactctttccatgaatctgacaggggcccgggaagaggcggaaaaacggatgctggtggaagcgttcgaacaggcgcgcggaaacatcagccacgtggcccgcatgatcggcaccagccggcccacggtccacgcgctgatcaaaaagcacggcctgagcccgaaggaattcaaggaataa

SEQ ID NO: 157105 - protein, 471 aa, Leptospirillum sp. Group II UBA
MTHETPEALSFQPSILIVDDDPVVLKQMTWLFKGEYPVLTADSASSAIEIFVREKPPVAILDLSLGKDSGQDGIDLLRFFAEADPHFHGIILSGSIDRPRALEAVRLGAYDLLDKSVDPEELKRVVGRACNRALLSRTPARPKELSPSAEESNPFPGIVTKNPGMKEMLRILQKISATDVSVLITGESGTGKELFARAIHERSPRKNGPFVAINCGAIPESLLESELFGHEKGAFTGATESRAGKFEAAHHGTLFLDEVAELQIELQVKLLRVLQDKIVERVGSRNGKQLDVRIIAATNQPLNELMARGRFREDLYYRLSVMSFHLPPLRDRGEDVLLLAQHFLEKFRTEYNKPQVIDFNRECLDVIRKHDWPGNIRELENRIQRAVIIASGKWVTREDLDIGLDSRKHGESTLSMNLTGAREEAEKRMLVEAFEQARGNISHVARMIGTSRPTVHALIKKHGLSPKEFKE

SEQ ID NO: 157106 - DNA, 1452 bp, Magnetospirillum gryphiswaldense
  CDS (1)..(1452): transl_table=11
atgaccaccaattccactattctggtcgccgacgatgatcgcggcatccgcaccgttttggcccaagccttgggccgtgccggctatgaggtgcgcaccaccggcaatgcctcgaccctgtggcgctgggtgtcggaaggcgagggcgatctggtcatcaccgacgtggtcatgcccgatgaaagcggtctcgacctgctgccgcgcatcaagaaaatccgtcccgacatgcgcatcatcgtcatgagcgcgcaaaacaccctgctgaccgccgtcaaggccacccagcgcggggccttcgagtatctgcccaagcccttcgacctgaaggagctggtggctgttgtcaatcgcgcattgacggcgccgcgctcggccccggcggaaggtcagcccggcgacgatgacgaggaaaagctgccgttgatcggccgctcgccggccatgcaggaaatctaccgcaccttggcgcggttgatgggcaccgacctgacggtgatgatcaccggcgaatcgggcaccggcaaggaactggtggcgcgcgccctgcatgattacggcaagcgccgcaacggcccgttcgtcgccatcaacatggcggccatcccgcgcgaactgatcgaaagcgaattgttcgggcatgaaaagggtgccttcaccggcgccacccagcgggccaccggtcggttcgagcaggccgagggcggcacgcttttcctggacgaaatcggcgacatgccgcccgaggcccagacccggttgctgcgtgtgttgcaggaaggcgaatacaccacggtgggcgggcggacccccatccgtgccaatgtgcgcatcgtcgccgccacccaccgcgacctgacccagttgatccgccaaggcctgttccgcgaggatctgttctatcgcttgaacgtggtgcccatccgcctgccgccgttgcgcgaacggaccgaagatattcccgaactgatccgtcatttcctcgcccagggcagcagcgagggcttgccgcaaaagagcatcgattcccaggccatggaccgcttgaagcgtcatcgctggcccggtaacgtgcgtgaactggaaaatctggtgcgccgtctggccgcgctttattcgcaggaagtcatcggtattgaggtgatcgaggccgaattggccggcggtgcgccggccagcgatgccatgagcgccggcgacggcgaggggctgtcggcctcggtcgagcggcatctgcgcgaatatttcggcagccacgaagacagcctgccgccgcccggcgtttatgaccgggtgctcagggaggtcgagcgtccgctgatcgccctggccttggaagtcacccgcggcaaccagatcaaggcggcgcagattctgggcctcaaccgcaacaccttgcgcaagaaaatccgcgaattggatgtttccgtcgggcgtggcggcttcaagtaa

SEQ ID NO: 157107 - protein, 483 aa, Magnetospirillum gryphiswaldense
MTTNSTILVADDDRGIRTVLAQALGRAGYEVRTTGNASTLWRWVSEGEGDLVITDVVMPDESGLDLLPRIKKIRPDMRIIVMSAQNTLLTAVKATQRGAFEYLPKPFDLKELVAVVNRALTAPRSAPAEGQPGDDDEEKLPLIGRSPAMQEIYRTLARLMGTDLTVMITGESGTGKELVARALHDYGKRRNGPFVAINMAAIPRELIESELFGHEKGAFTGATQRATGRFEQAEGGTLFLDEIGDMPPEAQTRLLRVLQEGEYTTVGGRTPIRANVRIVAATHRDLTQLIRQGLFREDLFYRLNVVPIRLPPLRERTEDIPELIRHFLAQGSSEGLPQKSIDSQAMDRLKRHRWPGNVRELENLVRRLAALYSQEVIGIEVIEAELAGGAPASDAMSAGDGEGLSASVERHLREYFGSHEDSLPPPGVYDRVLREVERPLIALALEVTRGNQIKAAQILGLNRNTLRKKIRELDVSVGRGGFK

SEQ ID NO: 157108 - DNA, 1443 bp, Candidatus Chloracidobacterium thermophilum
  CDS (1)..(1443): transl_table=11
atgtctaatcgcgtaccatccattctcatcgtcgatgatgagttgagcatgcgcgagctgctcgaccatgtgttccggcgggaaggataccgtacctttattgccgaaaatggcgctcaggccctggaggcactgcgggggaaggtgtttgatgttgtgctttctgatgtcaagatgccacgtctttccggcaccgaactcctgcatgaatgccgccaaatctcaccggacacggtagttatcctgatgacggcccacggcacggtggagcaggcgcgagaagccttcaagcttggcgcagacgacttcattcaaaagccctttgacattgacgagctcaagctcattgtcaaaaacgctttggagaaaagccttctgcggcgggaagtggccctgctcaagcgcgagttgggcgaccgcacgcggctggagaacatcatcgggcgcagccggtcaatgcaggaagtcctgcggcttattcagacggttgccggtacaaacagtacggtgctgattacgggcgaatccggtacggggaaggaacttgttgcccgtggtattcacgcatgcagcccacgccgcgatcgaccttttgtttccatcaattgcggcgccttcacagaaaccctgcttgagtcagagctctttggctacctgaagggcgcctttaccggcgccattatgaacaaaaaagggctttttgaggctgcggacggaggcaccttgttcctcgatgagattggggaaatgagcctaggcatgcaggtcaagctgttgcgcgtgctgcaggagcgcaccatccgacgagtgggtgggacggaagaaattccggtagatgtacgagttgttgctgccaccaaccgtgatctttcccagatggttgaagagggaacctttcgcaaagacttgtattttcgggtcaatgtcatccccatcaacgtcccaccgctgcgtgaacggcgggaggacatccgcgagctagcactgcacttcctgaaaaagtacggccaaaaccgcacgcccccggtgacgagtattgcggaagccacgctcaagtaccttgaaaactactcctttccgggaaatgtgcgggaactggaaaacatcatcgagcgtgccgtagcacttgagcccacccatgagatccagccggagcgcctcccggaaagcgtgctgcgctatgaccctgggcggactgcctcgctctttgagctgcctgaacagggcattcatctggaaaactttctgatggagattgagaaatcctacattttgcagtccctgcggcggacacggggcaatcagaccaaggccgccgagttgctgcacatgtcagtgcgtagcttgcgccacctgctcgacaagcacaagattcgccacacggcgagtatgttccgggaaagtggggcctttcgtactggcgatacttcagaagcatcgtaa

SEQ ID NO: 157109 - protein, 480 aa, Candidatus Chloracidobacterium thermophilum
MSNRVPSILIVDDELSMRELLDHVFRREGYRTFIAENGAQALEALRGKVFDVVLSDVKMPRLSGTELLHECRQISPDTVVILMTAHGTVEQAREAFKLGADDFIQKPFDIDELKLIVKNALEKSLLRREVALLKRELGDRTRLENIIGRSRSMQEVLRLIQTVAGTNSTVLITGESGTGKELVARGIHACSPRRDRPFVSINCGAFTETLLESELFGYLKGAFTGAIMNKKGLFEAADGGTLFLDEIGEMSLGMQVKLLRVLQERTIRRVGGTEEIPVDVRVVAATNRDLSQMVEEGTFRKDLYFRVNVIPINVPPLRERREDIRELALHFLKKYGQNRTPPVTSIAEATLKYLENYSFPGNVRELENIIERAVALEPTHEIQPERLPESVLRYDPGRTASLFELPEQGIHLENFLMEIEKSYILQSLRRTRGNQTKAAELLHMSVRSLRHLLDKHKIRHTASMFRESGAFRTGDTSEAS

SEQ ID NO: 157110 - DNA, 1416 bp, Leptospirillum sp. Group II '5-way CG'
  CDS (1)..(1416): transl_table=11
atgacacacgatgcccccgaagccctttccttccagccatcgattctgattgtggacgacgatccggtcgttctgaagcagatgacgtggctgttcaagggagagtatcccgtcctgaccgccgacagtgcttcttccgccatcgagatctttgtccgggaaaaaccgccggtcgcgatcctcgatctgtccctcggtaaggacgcagggcaggacggcatcgatctgctccgcttttttgccgaagccgacccgcattttcacgggattatcctgagcggatccatcgaccggccccgggcgctggaggcggttcgcctcggcgcctacgaccttctcgacaaatcggtcgaccccgaagaactgaaacgggtcgtggggagagcctgcaaccgtgcccttctctccagaacaccggttcaaacaaaagagatagccccttctgccgaagagtccaatccgtttccgggtatcgtcaccaaaaatcccggcatgcgggagatgctccggatcctgcagaagatcagcgccacggatgtatcggttctggtcacgggggaaagcggcaccgggaaagagttgttcgcccgggccatccatgaacgaagcccccgcaagaacgggccgttcgtcgccatcaattgcggcgccattccggaaagtcttctcgaaagcgagcttttcggtcacgaaaagggggcgtttacgggagcgaccgaaagccgggccggaaaattcgaagccgcccatcatggaacgctgtttctggatgaagtggccgaacttcagatcgagcttcaggtgaaacttttgcgggttctgcaggacaagatcgtcgaacgcgtcggaagccgcaacgggaagcagctcgacgtgcggatcatcgccgccaccaaccagcccctgaaagaattgatggcccggggacgattccgggaagacctctattaccgtctatccgtcatgagcttccacctcccgccccttcgggagcggggagaggacgttcttcttctggcccagcatttcctgtcgaagttccggacggaatataacaaaccccaggtgatcgatttcaacagggagtgtctggacgtcatccggaaacacgactggcccggtaacatccgggaacttgaaaaccggatccagcgggccgtgatcatcgccggcgggaaatgggtcacccgggaagatcttgatatcgggctcgactccagaaaccatggaggcaacacgctttccatgaatctctcaggagccagggaagaggcggaaaaacggatgctggtcgaagcgttcgaacaggcccggggcaacatcagccatgtggcccgcatgatcggcaccagccggcccacggtccacgccctgatcaagaagcacggactgagcccgaaggagttcaaggaataa

SEQ ID NO: 157111 - protein, 471 aa, Leptospirillum sp. Group II '5-way CG'
MTHDAPEALSFQPSILIVDDDPVVLKQMTWLFKGEYPVLTADSASSAIEIFVREKPPVAILDLSLGKDAGQDGIDLLRFFAEADPHFHGIILSGSIDRPRALEAVRLGAYDLLDKSVDPEELKRVVGRACNRALLSRTPVQTKEIAPSAEESNPFPGIVTKNPGMREMLRILQKISATDVSVLVTGESGTGKELFARAIHERSPRKNGPFVAINCGAIPESLLESELFGHEKGAFTGATESRAGKFEAAHHGTLFLDEVAELQIELQVKLLRVLQDKIVERVGSRNGKQLDVRIIAATNQPLKELMARGRFREDLYYRLSVMSFHLPPLRERGEDVLLLAQHFLSKFRTEYNKPQVIDFNRECLDVIRKHDWPGNIRELENRIQRAVIIAGGKWVTREDLDIGLDSRNHGGNTLSMNLSGAREEAEKRMLVEAFEQARGNISHVARMIGTSRPTVHALIKKHGLSPKEFKE

SEQ ID NO: 157112 - DNA, 1371 bp, Nitrosococcus oceani AFC27
  CDS (10)..(1371): transl_table=11
atgaatcaaatgactgaaaataacagagttttattggtagatgatgattgtgatttgttgtcgttgctctccattcgtttagagaacggtggctatgaacctgttcgagcggaaagcggagaagaagcgttagcccaggtagagctggcccgtccccaagccgtgatcacggatttgcgaatgggaggcatggatgggatggcgctagcggattgcattcaccggaaaaatccggcattaccggtgattattcttaccgcccatggttccatccccgatgcggtgcaggctactaaaaatggggtttttgcttttctgaccaagccttataatagccgggagctattgagtcaattggaaaaggcacttcgtgtttcaggtatttgccgcgacttggaagaaaccaccccggagagttggcgcgaggaaattgtcacccgcagcccgttgatggaggatctgctcagccaggcccgactggtggccgaaagcgaggccagcatttgtttacggggcgatagtggaacaggtaaggaattactggctaaagctattcacaaggcgagcccgcgcagtaagcagccttttattgccgttaactgcgcggcgattccggagttattgttggaatctgagttatttggtcacgccaagggtgcatttactggcgccacccgggatcatccaggattatttcaggctgcccatggtggtacattatttttagatgaaattggcgatatgccggttgcgctccaggtaaaattgctgcgggcactacaagagcagcaagtacggccggtaggaaacacctctacggtaagcgtggatgtgcgcattatctcggccacccacaaagatctggatgcggaggtgcgggatggaaacttccgggaggatctttattaccggcttaatgttgtgatcttggaaattccctctctcgctgaacggcgggaagatattctgtttcttgccaatcatttcttacacacctttcggcgtggaagcaaaaaaaacattcgaggattctcggctgaggcaattgagctattggttagcgccccttggccgggcaatgtccgtcagttatgtaatgtggtggagcaaaccgtggttttgtcaaccacgcctatcatttccgccaaactggtaaaaaaagcgctgcgtcagcagtcaggccaatttccttcctttgctgatgcgcggaggcaattcgagcaggaatatcttgcgggtctacttaaaattaccgatggtaatgtgactcgggcgtcccggttagcccggcgtaatcgcaccgatttttataagcttctccaacgtcatactttggatcctgccgattttaagcctgccaaatctcagtga

SEQ ID NO: 157113 - protein, 453 aa, Nitrosococcus oceani AFC27
MTENNRVLLVDDDCDLLSLLSIRLENGGYEPVRAESGEEALAQVELARPQAVITDLRMGGMDGMALADCIHRKNPALPVIILTAHGSIPDAVQATKNGVFAFLTKPYNSRELLSQLEKALRVSGICRDLEETTPESWREEIVTRSPLMEDLLSQARLVAESEASICLRGDSGTGKELLAKAIHKASPRSKQPFIAVNCAAIPELLLESELFGHAKGAFTGATRDHPGLFQAAHGGTLFLDEIGDMPVALQVKLLRALQEQQVRPVGNTSTVSVDVRIISATHKDLDAEVRDGNFREDLYYRLNVVILEIPSLAERREDILFLANHFLHTFRRGSKKNIRGFSAEAIELLVSAPWPGNVRQLCNVVEQTVVLSTTPIISAKLVKKALRQQSGQFPSFADARRQFEQEYLAGLLKITDGNVTRASRLARRNRTDFYKLLQRHTLDPADFKPAKSQ

SEQ ID NO: 157114 - DNA, 1341 bp, Providencia rustigianii DSM 4541
  CDS (1)..(1341): transl_table=11
atgacaagccgtaagtcagcgaacttactactggttgatgatgaccctagcctgctaaaactgttaggcatgcgcttaagtagtgaaggttttaaagtatcgacagcagagagtggtccagaagcactaaaacgcctacaaaaagaaaaaatcgatttagtgattagtgatttacgtatggatgaaatggatggcatggcgctgtttgatgaggtgcaaaaagcccatccaaatcttcctgtcattattctaacggcgcatggatctattccagatgcagttgcggccactcagcgtggcgtttttagcttcttaactaagcctgttgataaagatgcattgtataaagctattgatgaagcgttagctctgtcatccacgccgatgagcgatgaagagtggagctctggaattgtgactcgtagcccactcatgatccgcttacttgagcaagctcacatggtggcacagtcagatgtcagcgtgctaattaacgggcaaagtggtacggggaaagaggttttggctcaggcaatccatcgcgtgagtcctcgagctcataaaccgtttattgctattaactgcggtgcgttgccagaacaacttcttgagtccgaattatttggtcatgcaaaaggggccttcacaggggcagttagcagccgagaaggcttattttttgctgccaacggcggaaccctatttttagatgaaattggcgatatgccaatggctcttcaggttaaattactgcgtgttttacaggagcgaaaagttcgccctctaggtagtaaccgtgatttagatatcgatgtacggattatctctgcaacacaccgtaatttacctaaagcgatggaaaaaaatgagtttcgtgaagacctttactatcgcttaaatgtcgtgaatttacgtattcctgcattgaatgaacgctcggaagatattccattattagctaatcatttactacgtgaagccgcaaatcgtcataagccatttgtacgcagtttttccagtgatgcaatgaagtgtttaatgacggcaagctggcccggtaatgtgcgtcagttggtcaacgtgattgagcaatgtgtggcactcaccacatctcccgtgatcagtgaagcattggtcagccaagctttagaaggggaaaacacagcattaccgacatttgtagaagcgcgtaatcaatttgaattgaattacttgcgtaaattattacagatgacgaaaggtaatgtgactcaagccgctcgcatggctgggcgaaaccgaactgaattctataagttactcgggcgccatgatttagaagcgaacgattttaaagaataa

SEQ ID NO: 157115 - protein, 446 aa, Providencia rustigianii DSM 4541
MTSRKSANLLLVDDDPSLLKLLGMRLSSEGFKVSTAESGPEALKRLQKEKIDLVISDLRMDEMDGMALFDEVQKAHPNLPVIILTAHGSIPDAVAATQRGVFSFLTKPVDKDALYKAIDEALALSSTPMSDEEWSSGIVTRSPLMIRLLEQAHMVAQSDVSVLINGQSGTGKEVLAQAIHRVSPRAHKPFIAINCGALPEQLLESELFGHAKGAFTGAVSSREGLFFAANGGTLFLDEIGDMPMALQVKLLRVLQERKVRPLGSNRDLDIDVRIISATHRNLPKAMEKNEFREDLYYRLNVVNLRIPALNERSEDIPLLANHLLREAANRHKPFVRSFSSDAMKCLMTASWPGNVRQLVNVIEQCVALTTSPVISEALVSQALEGENTALPTFVEARNQFELNYLRKLLQMTKGNVTQAARMAGRNRTEFYKLLGRHDLEANDFKE

SEQ ID NO: 157116 - DNA, 1341 bp, Providencia alcalifaciens DSM 30120
  CDS (1)..(1341): transl_table=11
atgaccagccgtaagtcagctaacttacttttggtggatgatgatcccagcctgttaaaattgcttggaatgcgtctaagtagtgaaggatttaaagtctcaacagcagaaagcggacctgaagcgctaaaattactgcaaaaagaaaaaattgacttagtcattagcgatttacgcatggacgagatggatggtatggcactgtttgatgaagtgcaaaaagcccatcccaaccttcctgtgattatcttaaccgctcatggctcgattcccgatgcagtggcagcgactcaacgcggtgtatttagtttcttaacgaaacctgttgataaagacgcactctacaaagccattgatgaagcgctagcgttgtcatcaacgccaataagtgatgtagagtggaactcgggtattgtgactcgcagcccactcatgatccgtctgcttgagcaggctcacatggtggctcagtctgatgtcagtgtgctcatcaatgggcaaagtggtacaggtaaagaagtattagcgcaagctattcacaaggtgagccctcgtgctcataagccgtttattgcgattaactgtggtgcgctgcctgaacaattacttgaatctgaactgtttggacatgctaaaggcgcatttacgggagcggtgagtagccgtgaagggctattttttgcagccagcggcggtacgctctttttagatgagattggtgatatgccaatgccacttcaagtgaaattactgcgtgttttgcaggagcgaaaagtacgccctttgggaagtaaccgagatttagatattgatgtgcggatcatttctgctactcaccgtaacttacctaaagcaatggaaaaaaatgagtttcgtgaagatctctattatcgcttgaatgtggtgaacttacggatccctgcattaaatgaacgcgctgaagatattccattattagcaaatcatttattacgtgaagctgcgaaccggcataagccttttgtgcgcagcttttcgagtgatgcgatgaagtgtttgatcactgcaagttggcccggaaatgtgcgtcaattagtcaacgtgattgagcaatgtgttgcattaacaacatccccagtaattagtgaagccttggttagccaagcattagaaggggagaatacggcgttaccgacctttgtagaagcgcgtaaccaatttgaattgaattatctgcgtaagttattgcagatgacaaaaggcaacgtgacccaagctgcacgtatggcgggacgcaaccgtaccgagttttataaactactcgggcgtcacgatttagaagcgaatgattttaaagaataa

SEQ ID NO: 157117 - protein, 446 aa, Providencia alcalifaciens DSM 30120
MTSRKSANLLLVDDDPSLLKLLGMRLSSEGFKVSTAESGPEALKLLQKEKIDLVISDLRMDEMDGMALFDEVQKAHPNLPVIILTAHGSIPDAVAATQRGVFSFLTKPVDKDALYKAIDEALALSSTPISDVEWNSGIVTRSPLMIRLLEQAHMVAQSDVSVLINGQSGTGKEVLAQAIHKVSPRAHKPFIAINCGALPEQLLESELFGHAKGAFTGAVSSREGLFFAASGGTLFLDEIGDMPMPLQVKLLRVLQERKVRPLGSNRDLDIDVRIISATHRNLPKAMEKNEFREDLYYRLNVVNLRIPALNERAEDIPLLANHLLREAANRHKPFVRSFSSDAMKCLITASWPGNVRQLVNVIEQCVALTTSPVISEALVSQALEGENTALPTFVEARNQFELNYLRKLLQMTKGNVTQAARMAGRNRTEFYKLLGRHDLEANDFKE

SEQ ID NO: 157118 - DNA, 1374 bp, Candidatus Kuenenia stuttgartiensis
  CDS (1)..(1374): transl_table=11
atgtcaaaagaaaaaatacttattatagatgatgatgcgagcattttagaagtcctgcagatgcgtttaaaagcattaggctattctgtatcaatagcaaaggacggagatgaagcgaaaacggtattatttcagaacaagattaaccttgttcttgttgacctccggttgtctgaagaaaatggtatagaattaatgagagatataataaagaattatcccaagctccccattattataataacggcgcatggaagtatagaaagcgccgtagaagccatgagaaggggcgcctatagttatatcgccaaacccttcaggaatgatgatttggcaatgcagatcaaaaatgcccttgagaaacaaaggcttacacaagaaatagaatacctaaggaatcagcttgatgaacggaacaattttaatccgattatcgggaaaaataaacagatgctggaaatccttgaactggtgtcaagggtgtcaaaaactgattgcaatgttatcatttatggagaaagcggtaccggaaaggaattgatagccagggcaattcaccaaaatagtaaccgtgccaatgggccgtttattgccacaaactgcggtgctatcccggagggattattggaaaatgaactgttcggacatatacgaggggcttatacggacgcacatgaatcaaaagagggactttttgcgcaagccgataaagggtcaatctttcttgacgaaatcagcaatacttcaatgatattccaaataaaacttttgagagttttgcaagaaagggaaattaaaccagtcggaagtacaaagaacagaaagatcaacgtcaggattattgccgcctcgaacaccgatttgcaaaaggcagtgagcgaagggacttttcgtgatgatttgttttacagaatacatgttatgcctgtctatcttcctcccttaaggcaaagaaaagatgatatcccgctattggcaacgtattttataacggaattttgcaaggctttaaagaaagacccgcttggattttctcccgcggccttacaaaggatgcttttgtatgactggccgggaaatattcgtgaattaagaaacaaaatagagcatgcggccatcgtggcaaataaaaataatattgaaccggaagatatttttccggaaagaaataccaccacaaatgtttttcattcttacaaggacgcgaaagaaagattcgaaagggaatacatcgaaaatctactgaaggcaaacaatggcaacattacaaatgcatcaaaaatggcaagccgttacagggctgatatctataagctgataaaaaaatacaatattaatcctgaagattataaagcacatgttagtaaattgtaa

SEQ ID NO: 157119 - protein, 457 aa, Candidatus Kuenenia stuttgartiensis
MSKEKILIIDDDASILEVLQMRLKALGYSVSIAKDGDEAKTVLFQNKINLVLVDLRLSEENGIELMRDIIKNYPKLPIIIITAHGSIESAVEAMRRGAYSYIAKPFRNDDLAMQIKNALEKQRLTQEIEYLRNQLDERNNFNPIIGKNKQMLEILELVSRVSKTDCNVIIYGESGTGKELIARAIHQNSNRANGPFIATNCGAIPEGLLENELFGHIRGAYTDAHESKEGLFAQADKGSIFLDEISNTSMIFQIKLLRVLQEREIKPVGSTKNRKINVRIIAASNTDLQKAVSEGTFRDDLFYRIHVMPVYLPPLRQRKDDIPLLATYFITEFCKALKKDPLGFSPAALQRMLLYDWPGNIRELRNKIEHAAIVANKNNIEPEDIFPERNTTTNVFHSYKDAKERFEREYIENLLKANNGNITNASKMASRYRADIYKLIKKYNINPEDYKAHVSKL

SEQ ID NO: 157120 - DNA, 24 bp, Artificial sequence
  primer
atgagccataaacctgcgcattta

SEQ ID NO: 157121 - DNA, 27 bp, Artificial sequence
  primer
ttattccttgaaatcgtttgcatccag

SEQ ID NO: 157122 - protein, 496 aa, Artificial sequence
  consensus sequence
  Variant (2)..(2): Xaa in position 2 is any amino acid
  Variant (7)..(12): Xaa in position 7 to 12 is any amino acid
  Variant (14)..(15): Xaa in position 14 to 15 is any amino acid
  Variant (16)..(18): Xaa in position 16 to 18 is any or no amino acid
  Variant (20)..(21): Xaa in position 20 to 21 is any amino acid
  Variant (22)..(22): Xaa in position 22 is any or no amino acid
  Variant (24)..(25): Xaa in position 24 to 25 is any amino acid
  Variant (27)..(35): Xaa in position 27 to 35 is any amino acid
  Variant (37)..(44): Xaa in position 37 to 44 is any amino acid
  Variant (45)..(49): Xaa in position 45 to 49 is any or no amino acid
  Variant (51)..(52): Xaa in position 51 to 52 is any amino acid
  Variant (54)..(54): Xaa in position 54 is any amino acid
  Variant (57)..(59): Xaa in position 57 to 59 is any amino acid
  Variant (60)..(62): Xaa in position 60 to 62 is any or no amino acid
  Variant (65)..(66): Xaa in position 65 to 66 is any amino acid
  Variant (68)..(75): Xaa in position 68 to 75 is any amino acid
  Variant (77)..(78): Xaa in position 77 to 78 is any amino acid
  Variant (80)..(80): Xaa in position 80 is any amino acid
  Variant (81)..(81): Xaa in position 81 is any or no amino acid
  Variant (83)..(85): Xaa in position 83 to 85 is any amino acid
  Variant (88)..(93): Xaa in position 88 to 93 is any amino acid
  Variant (96)..(96): Xaa in position 96 is any amino acid
  Variant (98)..(100): Xaa in position 98 to 100 is any amino acid
  Variant (102)..(105): Xaa in position 102 to 105 is any amino acid
  Variant (107)..(107): Xaa in position 107 is any amino acid
  Variant (110)..(114): Xaa in position 110 to 114 is any amino acid
  Variant (115)..(115): Xaa in position 115 is any or no amino acid
  Variant (117)..(122): Xaa in position 117 to 122 is any amino acid
  Variant (125)..(138): Xaa in position 125 to 138 is any amino acid
  Variant (139)..(168): Xaa in position 139 to 168 is any or no amino acid
  Variant (170)..(171): Xaa in position 170 to 171 is any amino acid
  Variant (173)..(182): Xaa in position 173 to 182 is any amino acid
  Variant (184)..(188): Xaa in position 184 to 188 is any amino acid
  Variant (189)..(189): Xaa in position 189 is any or no amino acid
  Variant (193)..(193): Xaa in position 193 is any amino acid
  Variant (195)..(195): Xaa in position 195 is any amino acid
  Variant (202)..(203): Xaa in position 202 to 203 is any amino acid
  Variant (205)..(205): Xaa in position 205 is any amino acid
  Variant (209)..(210): Xaa in position 209 to 210 is any amino acid
  Variant (212)..(212): Xaa in position 212 is any amino acid
  Variant (214)..(216): Xaa in position 214 to 216 is any amino acid
  Variant (219)..(221): Xaa in position 219 to 221 is any amino acid
  Variant (224)..(224): Xaa in position 224 is any amino acid
  Variant (226)..(226): Xaa in position 226 is any amino acid
  Variant (229)..(229): Xaa in position 229 is any amino acid
  Variant (239)..(240): Xaa in position 239 to 240 is any amino acid
  Variant (247)..(248): Xaa in position 247 to 248 is any amino acid
  Variant (249)..(251): Xaa in position 249 to 251 is any or no amino acid
  Variant (253)..(253): Xaa in position 253 is any amino acid
  Variant (255)..(256): Xaa in position 255 to 256 is any amino acid
  Variant (258)..(258): Xaa in position 258 is any amino acid
  Variant (270)..(274): Xaa in position 270 to 274 is any amino acid
  Variant (281)..(281): Xaa in position 281 is any amino acid
  Variant (285)..(290): Xaa in position 285 to 290 is any amino acid
  Variant (292)..(297): Xaa in position 292 to 297 is any amino acid
  Variant (298)..(298): Xaa in position 298 is any or no amino acid
  Variant (302)..(304): Xaa in position 302 to 304 is any amino acid
  Variant (308)..(308): Xaa in position 308 is any amino acid
  Variant (311)..(318): Xaa in position 311 to 318 is any amino acid
  Variant (321)..(321): Xaa in position 321 is any amino acid
  Variant (331)..(334): Xaa in position 331 to 334 is any amino acid
  Variant (336)..(336): Xaa in position 336 is any amino acid
  Variant (338)..(339): Xaa in position 338 to 339 is any amino acid
  Variant (341)..(341): Xaa in position 341 is any amino acid
  Variant (349)..(349): Xaa in position 349 is any amino acid
  Variant (351)..(351): Xaa in position 351 is any amino acid
  Variant (353)..(365): Xaa in position 353 to 365 is any amino acid
  Variant (366)..(370): Xaa in position 366 to 370 is any or no amino acid
  Variant (372)..(374): Xaa in position 372 to 374 is any amino acid
  Variant (376)..(379): Xaa in position 376 to 379 is any amino acid
  Variant (384)..(384): Xaa in position 384 is any amino acid
  Variant (386)..(386): Xaa in position 386 is any amino acid
  Variant (388)..(388): Xaa in position 388 is any amino acid
  Variant (390)..(391): Xaa in position 390 to 391 is any amino acid
  Variant (393)..(396): Xaa in position 393 to 396 is any amino acid
  Variant (398)..(402): Xaa in position 398 to 402 is any amino acid
  Variant (404)..(421): Xaa in position 404 to 421 is any amino acid
  Variant (422)..(462): Xaa in position 422 to 462 is any or no amino acid
  Variant (464)..(470): Xaa in position 464 to 470 is any amino acid
  Variant (472)..(475): Xaa in position 472 to 475 is any amino acid
  Variant (478)..(480): Xaa in position 478 to 480 is any amino acid
  Variant (483)..(487): Xaa in position 483 to 487 is any amino acid
  Variant (488)..(488): Xaa in position 488 is any or no amino acid
  Variant (490)..(494): Xaa in position 490 to 494 is any amino acid
  Variant (495)..(495): Xaa in position 495 is any or no amino acid
LXVDDDXXXXXXLXXXXXLXXXGXXVXXXXXXXXXLXXXXXXXXXXXXXVXXDXRMXXXXXXDGXXLXXXXXXXXPXXPXXVXXXTAXXXXXXAVXAXXXGXXXXLXKPXXXXXXLXXXXXXALXXXXXXXXXXXXXXXXXXXXXXXXXXXXXXXXXXXXXXXXXXXXSXXMXXXXXXXXXXAXXXXXXVLIXGXSGTGKEXXAXAIHXXSXRXXXPFXXXNCXAXPEXLLESELFGHXXGAFTGAXXXXXGXFXXAXGGTLFLDEIGDXXXXXQVKLLRXLQEXXXXXXGXXXXXXXDVRXXXATHXDLXXXXXXXXFRXDLYYRLNVVXXXXPXLXXRXEDIPLLAXHXLXXXXXXXXXXXXXXXXXXAXXXLXXXXWPGNXRXLXNXXEXXXXLXXXXXIXXXXXXXXXXXXXXXXXXXXXXXXXXXXXXXXXXXXXXXXXXXXXXXXXXXXXXXXXXXEXXXXXXXLXXXXGNXXXAAXXXXXXRXXXXXXL

SEQ ID NO: 157123 - protein, 49 aa, Artificial sequence
  protein pattern
  Variant (2)..(6): Xaa in position 2 to 6 is any amino acid
  Variant (7)..(7): Xaa in position 7 is any or no amino acid
  Variant (9)..(9): Xaa in position 9 is any amino acid
  Variant (13)..(13): Xaa in position 13 is Ile, Leu, Met or Val
  Variant (14)..(14): Xaa in position 14 is any amino acid
  Variant (16)..(17): Xaa in position 16 to 17 is any amino acid
  Variant (18)..(18): Xaa in position 18 is Ile, Leu or Val
  Variant (20)..(21): Xaa in position 20 to 21 is any amino acid
  Variant (22)..(22): Xaa in position 22 is Gly or Ser
  Variant (23)..(23): Xaa in position 23 is any amino acid
  Variant (25)..(27): Xaa in position 25 to 27 is any amino acid
  Variant (28)..(28): Xaa in position 28 is Ala, Asn, Pro or Thr
  Variant (29)..(29): Xaa in position 29 is Phe or Leu
  Variant (30)..(30): Xaa in position 30 is Ala, Ile, Leu or Val
  Variant (31)..(31): Xaa in position 31 is any amino acid
  Variant (32)..(32): Xaa in position 32 is Ile, Leu or Val
  Variant (35)..(35): Xaa in position 35 is Ala, Gly, Pro or Ser
  Variant (36)..(36): Xaa in position 36 is Ala, Gly, Ser or Thr
  Variant (37)..(37): Xaa in position 37 is Phe, Ile, Leu or Val
  Variant (38)..(38): Xaa in position 38 is Asn, Pro or Thr
  Variant (39)..(40): Xaa in position 39 to 40 is any amino acid
  Variant (41)..(41): Xaa in position 41 is Ile, Leu or Val
  Variant (42)..(42): Xaa in position 42 is Ile, Leu, Met or Val
  Variant (46)..(46): Xaa in position 46 is Phe, Leu or Met
  Variant (49)..(49): Xaa in position 49 is His or Tyr
LXXXXXXGXGKEXXAXXXHXXXXRXXXXXXXXNCXXXXXXXXESEXFGX

SEQ ID NO: 157124 - protein, 40 aa, Artificial sequence
  protein pattern
  Variant (2)..(5): Xaa in position 2 to 5 is any amino acid
  Variant (7)..(7): Xaa in position 7 is any amino acid
  Variant (11)..(11): Xaa in position 11 is Ile, Leu or Val
  Variant (12)..(12): Xaa in position 12 is Phe, Leu or Val
  Variant (16)..(16): Xaa in position 16 is Ile or Val
  Variant (17)..(17): Xaa in position 17 is Ala, Glu, Gly or Ser
  Variant (18)..(18): Xaa in position 18 is Asp, Glu or Ser
  Variant (19)..(19): Xaa in position 19 is Ile, Leu, Met or Val
  Variant (20)..(20): Xaa in position 20 is Ala, Pro, Ser or Thr
  Variant (21)..(23): Xaa in position 21 to 23 is any amino acid
  Variant (25)..(25): Xaa in position 25 is Ala, Gly, Thr or Val
  Variant (26)..(26): Xaa in position 26 is Lys or Arg
  Variant (30)..(30): Xaa in position 30 is any amino acid
  Variant (31)..(31): Xaa in position 31 is Ile or Leu
  Variant (33)..(33): Xaa in position 33 is Asp or Glu
  Variant (34)..(38): Xaa in position 34 to 38 is any amino acid
  Variant (39)..(39): Xaa in position 39 is Ile, Leu or Val
GXXXXAXGGTXXLDEXXXXXXXXQXXLLRXXQXXXXXXXG

SEQ ID NO: 157125 - protein, 51 aa, Artificial sequence
  protein pattern
  Variant (2)..(4): Xaa in position 2 to 4 is any amino acid
  Variant (7)..(8): Xaa in position 7 to 8 is any amino acid
  Variant (9)..(9): Xaa in position 9 is Asp, Asn or Pro
  Variant (11)..(18): Xaa in position 11 to 18 is any amino acid
  Variant (21)..(21): Xaa in position 21 is Ala, Asp, Glu, Gln or Ser
  Variant (24)..(24): Xaa in position 24 is any amino acid
  Variant (27)..(27): Xaa in position 27 is Ile or Leu
  Variant (28)..(28): Xaa in position 28 is any amino acid
  Variant (30)..(30): Xaa in position 30 is Phe, Ile, Met or Val
  Variant (31)..(31): Xaa in position 31 is any amino acid
  Variant (32)..(32): Xaa in position 32 is Phe, Ile, Leu, Met or Val
  Variant (33)..(33): Xaa in position 33 is any amino acid
  Variant (34)..(34): Xaa in position 34 is Ile, Leu, Met or Val
  Variant (36)..(36): Xaa in position 36 is any amino acid
  Variant (38)..(39): Xaa in position 38 to 39 is any amino acid
  Variant (41)..(41): Xaa in position 41 is any amino acid
  Variant (42)..(42): Xaa in position 42 is Asp, Glu, Gln or Thr
  Variant (44)..(44): Xaa in position 44 is Ile or Val
  Variant (45)..(46): Xaa in position 45 to 46 is any amino acid
  Variant (48)..(50): Xaa in position 48 to 50 is any amino acid
  Variant (51)..(51): Xaa in position 51 is Phe, Ile or Leu
RXXXATXXXLXXXXXXXXFRXDLXYRXXVXXXXXPXLXXRXXDXXXLXXXX

SEQ ID NO: 157126 - protein, 29 aa, Artificial sequence
  protein pattern
  Variant (3)..(3): Xaa in position 3 is Ile or Leu
  Variant (4)..(4): Xaa in position 4 is Ile, Leu, Met or Val
  Variant (5)..(5): Xaa in position 5 is Phe, Ile, Leu, Met or Val
  Variant (6)..(6): Xaa in position 6 is Ser or Thr
  Variant (7)..(7): Xaa in position 7 is Ala or Gly
  Variant (8)..(8): Xaa in position 8 is any amino acid
  Variant (9)..(9): Xaa in position 9 is Ala, Gly or Ser
  Variant (10)..(10): Xaa in position 10 is Asp, Ser or Thr
  Variant (11)..(11): Xaa in position 11 is Ile, Leu, Pro or Val
  Variant (12)..(13): Xaa in position 12 to 13 is any amino acid
  Variant (14)..(14): Xaa in position 14 is Ala or Thr
  Variant (15)..(15): Xaa in position 15 is Ile, Leu or Val
  Variant (16)..(16): Xaa in position 16 is any amino acid
  Variant (17)..(17): Xaa in position 17 is Ala or Ser
  Variant (18)..(20): Xaa in position 18 to 20 is any amino acid
  Variant (21)..(21): Xaa in position 21 is Gly or Gln
  Variant (22)..(22): Xaa in position 22 is Ala, Ile or Val
  Variant (23)..(24): Xaa in position 23 to 24 is any amino acid
  Variant (25)..(25): Xaa in position 25 is Phe, His or Tyr
  Variant (26)..(26): Xaa in position 26 is Ile, Leu, Met or Val
  Variant (27)..(27): Xaa in position 27 is any amino acid
PVXXXXXXXXXXXXXXXXXXXXXXXXXKP

SEQ ID NO: 157127 - protein, 15 aa, Artificial sequence
  protein pattern
  Variant (4)..(4): Xaa in position 4 is Ile or Val
  Variant (6)..(6): Xaa in position 6 is Glu or Gln
  Variant (8)..(10): Xaa in position 8 to 10 is any or no amino acid
  Variant (12)..(14): Xaa in position 12 to 14 is any amino acid
  Variant (15)..(15): Xaa in position 15 is Ala, Cys, Ser, Thr or Val
PGNXRXLXXXVXXXX

SEQ ID NO: 157128 - DNA, 3369 bp, Escherichia coli
  CDS (1)..(3369): transl_table=11
atgttaagggtctaccattccaatcgtctggacgtgctggaagcgttgatggagtttattgtcgaacgcgaacggctggacgatcctttcgaaccagagatgattctggtgcaaagtaccggtatggcacagtggctgcaaatgaccctgtcgcaaaagtttggtattgcggcaaacattgattttccgctgccagcgagctttatctgggatatgttcgtccgggtgttaccggaaatccccaaagagagcgcctttaacaaacagagcatgagctggaaactgatgactctgctgccgcaattgctggagcgcgaagactttaccctgttgcggcattatctgactgacgatagcgacaagcgaaaactgttccagctttcctcaaaagcggcggacctgtttgaccagtatctggtctatcgtccggactggctggcacagtgggaaacaggacatttggttgaagggctgggagaagcacaggcctggcaagccccgttgtggaaggcgctggtggaatatacccatcaactcgggcaaccgcgctggcaccgcgccaatctctatcagcgctttatcgaaacgctggagtccgcgacgacctgcccgccggggttaccttcgcgcgtctttatatgcggtatttccgcgttaccgcctgtttatctccaggcgctacaggcgctgggtaaacatattgaaatccatctcctgtttaccaacccctgccgttattactggggcgatattaaagatcctgcttatctggcgaaactgctgacccgtcagcgtcgacacagttttgaagatcgcgaattgccgctatttcgtgatagcgaaaatgccgggcagctctttaacagcgatggtgaacaggatgtcggcaacccgctgctggcttcatggggtaagcttgggcgcgactacatttatctcctttctgacctggagagcagccaggagctggacgcctttgtcgatgtcacgccagataacctgctgcataacattcagtctgacattctggaactggaaaaccgcgccgttgctggtgtgaacatcgaagagttttcccgtagcgataacaaacgcccgcttgatccactggatagcagtatcaccttccacgtttgccatagcccgcagcgtgaagttgaagttttacacgatcgcctgctggcgatgctggaggaagacccgacacttactccgcgcgacatcatcgtgatggtggctgatatcgacagctacagtccgtttattcaggctgtgtttggtagcgcacctgcggatcgttacctaccttacgccatttccgaccgtcgtgcgcggcagtcacatccggtactggaagcgtttatcagcctgttatcactgcctgacagtcgttttgtgtcagaggatgtgctggcgttgctggatgtgccggtgctggcggcgcggtttgacatcaccgaagaagggctgcgttatttacgccagtgggtcaacgaatccggcattcgttggggcatagatgacgacaacgttcgcgagctggaactccccgccaccggacaacacacctggcgatttggcctgacgcgtatgttgttgggctacgcgatggagagcgcgcagggcgagtggcaatcggttctaccttatgatgaatcgagcggcttaattgcagaactggtggggcatctggcttcactgctaatgcagctaaacatctggcgtcgcgggctggcacaggagcgtccgctggaagagtggttgccggtttgtcgcgatatgctcaacgccttcttcctgccggatgcggaaaccgaagcggcgatgacgctgatcgaacaacaatggcaggcgattatcgccgaaggtttaggtgcgcagtatggcgacgcggtgccgctgtcactattgcgtgatgaactggcacagcgtctggatcaagaacgtatcagccagcgttttctcgccggaccggttaacatttgtactctgatgccaatgcgttcaattccgttcaaagtggtttgcctgctgggaatgaacgacggcgtttatccacgtcagcttgcgccattgggctttgacctgatgagccagaaaccgaagcgtggcgaccgtagccgtcgcgatgacgaccgctatctgttcctggaagcgttaatttccgcgcagcaaaaactctatatcagctatatcggtcgttccattcaggataacagtgagcgtttcccgtcggtactggtgcaggaactgatcgactacatcgggcaaagtcattatctaccgggcgatgaagcgctcaactgtgatgaaagcgaggcaagggtaaaagcgcatcttacttgcctccatacccggatgccgtttgatccacaaaactaccagccaggcgaacgacaaagctatgctcgtgaatggctacctgcggccagccaggctggtaaagcacattctgaatttgttcagccgctgccgtttaccttaccggaaaccgtgccgctggaaacgctacaacgattctgggcacatccggtgcgggcatttttccagatgcgtttgcaggtgaacttccgtactgaagacagcgaaatccccgacaccgagccatttattctggaaggacttagccgttatcaaatcaatcagcagttattgaatgcactggttgagcaggatgatgccgaacgcttgttccgccgcttccgagcggcaggggatttaccgtatggcgcttttggtgaaattttctgggaaacacagtgccaggagatgcagcagcttgccgacagagtcattgcctgtcgccagccggggcagagtatggaaattgatctcgcctgcaacggtgtgcagataactggctggttgccgcaggtgcagccggatggcctgttgcgctggcgtccctctttattaagtgtggcccagggaatgcaactttggctggaacaccttgtctactgtgccagcggtggtaatggtgaaagtcgcctttttctacgcaaagacggcgagtggcgttttccgccgcttgcagccgaacaggctttgcattacctctcacaactgattgaggggtatcgtgaaggaatgtccgcgccattgctggtgttacctgaaagtggcggcgcgtggctaaaaacctgttatgacgcgcaaaacgatgccatgctggatgacgattccacgttgcaaaaagcccgtacgaaattccttcaggcttacgaaggcaacatgatggtgcgtggcgaaggtgatgatatctggtatcaaaggctctggcggcaattaacaccagagacaatggaggccatcgttgaacagtcgcaacgtttcctgttaccgctgtttcgctttaatcagtcataa

SEQ ID NO: 157129 - protein, 1122 aa, Escherichia coli
MLRVYHSNRLDVLEALMEFIVERERLDDPFEPEMILVQSTGMAQWLQMTLSQKFGIAANIDFPLPASFIWDMFVRVLPEIPKESAFNKQSMSWKLMTLLPQLLEREDFTLLRHYLTDDSDKRKLFQLSSKAADLFDQYLVYRPDWLAQWETGHLVEGLGEAQAWQAPLWKALVEYTHQLGQPRWHRANLYQRFIETLESATTCPPGLPSRVFICGISALPPVYLQALQALGKHIEIHLLFTNPCRYYWGDIKDPAYLAKLLTRQRRHSFEDRELPLFRDSENAGQLFNSDGEQDVGNPLLASWGKLGRDYIYLLSDLESSQELDAFVDVTPDNLLHNIQSDILELENRAVAGVNIEEFSRSDNKRPLDPLDSSITFHVCHSPQREVEVLHDRLLAMLEEDPTLTPRDIIVMVADIDSYSPFIQAVFGSAPADRYLPYAISDRRARQSHPVLEAFISLLSLPDSRFVSEDVLALLDVPVLAARFDITEEGLRYLRQWVNESGIRWGIDDDNVRELELPATGQHTWRFGLTRMLLGYAMESAQGEWQSVLPYDESSGLIAELVGHLASLLMQLNIWRRGLAQERPLEEWLPVCRDMLNAFFLPDAETEAAMTLIEQQWQAIIAEGLGAQYGDAVPLSLLRDELAQRLDQERISQRFLAGPVNICTLMPMRSIPFKVVCLLGMNDGVYPRQLAPLGFDLMSQKPKRGDRSRRDDDRYLFLEALISAQQKLYISYIGRSIQDNSERFPSVLVQELIDYIGQSHYLPGDEALNCDESEARVKAHLTCLHTRMPFDPQNYQPGERQSYAREWLPAASQAGKAHSEFVQPLPFTLPETVPLETLQRFWAHPVRAFFQMRLQVNFRTEDSEIPDTEPFILEGLSRYQINQQLLNALVEQDDAERLFRRFRAAGDLPYGAFGEIFWETQCQEMQQLADRVIACRQPGQSMEIDLACNGVQITGWLPQVQPDGLLRWRPSLLSVAQGMQLWLEHLVYCASGGNGESRLFLRKDGEWRFPPLAAEQALHYLSQLIEGYREGMSAPLLVLPESGGAWLKTCYDAQNDAMLDDDSTLQKARTKFLQAYEGNMMVRGEGDDIWYQRLWRQLTPETMEAIVEQSQRFLLPLFRFNQS

SEQ ID NO: 157130 - DNA, 3318 bp, Prochlorococcus marinus str. MIT 9211
  CDS (1)..(3318): transl_table=11
ttgctaacaatttaccgaagcaacagagctgaatggcttgcaaatgttttggctgaacagcttcgagcaaatcctccaggattatctgagaacgtggaaattgttgtcaatacatggccaacaggcagatggttaggagaggagatcgctaaaatcaatggaattagtgcattagttagatttccatttcctgctgcacagctaaagacacttgttagaaaatttcttggaatagaagtaataaatgacgacgacccttgggaagccaaccaacttatatggccgatacttaactcattacctgaattacttcaaaaagaggaagctggagtattacagaagtggctagaaagagatctaagccaatccggaaaactcagcagagatgaatggcaactagcaaaaactattgcctatacatttgatgagtacatcatgtacagacctgatgttatttctgactggtggggtacggaaaatgaaataaataacctcaaatcaaaattacctaaatacattcaatggcaacctatattgatcaatctcctaaaacaaagaattactcaggagccatttggattacaagtcaggaatgttgcttcaaaactaaagaaaggaatcgctccgaagcaaaaccttccttcagatcttcgaatctttgggatcaatagtctcgctccagttcaactagagcttattcaagccttgtcttgcataatggaagtgaaggtattcctactaactccttgcaaggacttatggagccgctgcaaaacgaagagagaagaatacggtgaaggctggaaggtagctaatgataagttgtggttactcaataaacaacgacttgaagccactcttggtcgtatgggctctgagttcgagcaattattagaaggtagtggggaatatcaattaggagagtgggacgaaaaagatctttttgctatgcctgcgactatagccctaaacaagcaaagaaagccaactcttcttgaacagattcagcaaagactagtaaccaatgaatgtattgaaccgctgcagagaagcttagatgactcttcaatatcttttactgaatgtcctggtccaaagaggcaaattcaaattgtacgagatcaaatacttcagcagcttgcattaaacaaaaatctagagccaaaagacatcctaataatgacaccacaagttgaaaaatttgctcatttaataccttctatttttaatgacgtttcagcaacaggggttactcttccatggaaaatcactgatagaagtcagtatgaccagccaggtttaacacaatgcataatattattaatggaaattgcatgtacgcgtttaactgcaagtaatttagatcaactgctgaccaaccctgtaataaaagatctatacaaattagacgacagtgaaattgataaaatcacaaattgcctacaagaaacagggtttcggtggggtataaactctttagaacgagatggggaagaaacacatactttaaactggtgtctggagcggtggcttgtaggcatggtaatacctactatccctggtctggtgctaggtggaattgctcctttctcgaaaggaatatctataagcgaattgtcaaagtggtgggaaatcctatcaaagatatgcaatatgcttcagggactaagacagtctcatagctgtatgaaatggggcttggtgctaaaaggactctgtgatgatctatgcaacaatgatcgcaagtggtcatgggaacgtcaacgatttcttcgtgccatagacgattggataagagcagcagactgttttaaaaaagaaataaaaatagaagttgtagctgaaatagttaaagatttaatagctaaagaagcaggacgttttggacacaggaccgggagaataaccattagtgcattggagcccatgagagcgattccacacaaaatgattgtattaatgggcctagatgagacaatttttcctcgtaaacaacagcgtccagggtttagccttttagatcataaacactttttaggcgatccaagaataaatgataaggatagatatgtgcttttagaagcattaatctctactagggaaacgttgcttattacttgggatggtagagatgaaaagactggagattcacttgaaccttctagtccagttcaacagttttttgagtacctacaacatgaacttggagaaaagagctccatgggacttttaaaaaaaccaagccccaatcctctcaacaagaacaatttcctaagctgtaataatcaacctcccataagttgtgataagcgtgatttagagacacggcaatggatgaatgcaaagcagggatctcggggcttaactctagctttgccgttaaattggaatctgagcaaaaatgcagtcaactcctcttcagataacgaattgcttaagtcgtggttggctacaccacaactaaaatggcttgaacaatttcatttacatcctcgcgaatggaataagcctattgaagacctagactctctcagcattcccgagctcattaaatttaagatcctcaaacaagaatttacggagctaataacttcctcaaacaaccaaataataagtccagaaattaatgaaagagaatcacctaattggcaagataaatatttaggtcaaggtgttttccctccaaaatcagcagccactctagagagtgaaatacttggtagacgttggactagcctaattaaatcactctcgaaactaggagaggtaaaaagagattcattgatggaagataatgaaacaggggagatattgattgcgaataattgcactgttctagtagagattgggaggcttaaagctaagacgatcttaaatacctggcttactcatttaaagttatccgcatatcacaagtctaccaagaaaaccgtagtaatagcacgtagtgattcaaatacaaagatagattcgtatgaagtaatgcttagttggcatccaatgtcaagcatcaaggctgaaagcattctcgatgagttgaagcagcaagctcataatggtttaaagcaatgctggcctgtcccgcctgaaagtggatggaaattagcaaaagcacgctataaaaaatctaacgactgtaatgagatttttagaagagcctggattggtgactttaataaagagggcgaacgcaataaacctgagatgcagctttgttttgggtacaaagcagcacctgagatctttcttgagaatgaattatttgatcagtgcctggagttgttatacaaaccattaatagctcagcttgtcaaataa

SEQ ID NO: 157131 - protein, 1105 aa, Prochlorococcus marinus str. MIT 9211
MLTIYRSNRAEWLANVLAEQLRANPPGLSENVEIVVNTWPTGRWLGEEIAKINGISALVRFPFPAAQLKTLVRKFLGIEVINDDDPWEANQLIWPILNSLPELLQKEEAGVLQKWLERDLSQSGKLSRDEWQLAKTIAYTFDEYIMYRPDVISDWWGTENEINNLKSKLPKYIQWQPILINLLKQRITQEPFGLQVRNVASKLKKGIAPKQNLPSDLRIFGINSLAPVQLELIQALSCIMEVKVFLLTPCKDLWSRCKTKREEYGEGWKVANDKLWLLNKQRLEATLGRMGSEFEQLLEGSGEYQLGEWDEKDLFAMPATIALNKQRKPTLLEQIQQRLVTNECIEPLQRSLDDSSISFTECPGPKRQIQIVRDQILQQLALNKNLEPKDILIMTPQVEKFAHLIPSIFNDVSATGVTLPWKITDRSQYDQPGLTQCIILLMEIACTRLTASNLDQLLTNPVIKDLYKLDDSEIDKITNCLQETGFRWGINSLERDGEETHTLNWCLERWLVGMVIPTIPGLVLGGIAPFSKGISISELSKWWEILSKICNMLQGLRQSHSCMKWGLVLKGLCDDLCNNDRKWSWERQRFLRAIDDWIRAADCFKKEIKIEVVAEIVKDLIAKEAGRFGHRTGRITISALEPMRAIPHKMIVLMGLDETIFPRKQQRPGFSLLDHKHFLGDPRINDKDRYVLLEALISTRETLLITWDGRDEKTGDSLEPSSPVQQFFEYLQHELGEKSSMGLLKKPSPNPLNKNNFLSCNNQPPISCDKRDLETRQWMNAKQGSRGLTLALPLNWNLSKNAVNSSSDNELLKSWLATPQLKWLEQFHLHPREWNKPIEDLDSLSIPELIKFKILKQEFTELITSSNNQIISPEINERESPNWQDKYLGQGVFPPKSAATLESEILGRRWTSLIKSLSKLGEVKRDSLMEDNETGEILIANNCTVLVEIGRLKAKTILNTWLTHLKLSAYHKSTKKTVVIARSDSNTKIDSYEVMLSWHPMSSIKAESILDELKQQAHNGLKQCWPVPPESGWKLAKARYKKSNDCNEIFRRAWIGDFNKEGERNKPEMQLCFGYKAAPEIFLENELFDQCLELLYKPLIAQLVK

SEQ ID NO: 157132 - DNA, 3447 bp, Vibrio cholerae O1 biovar eltor str. N16961
  CDS (1)..(3447): transl_table=11
atgtttacggtctaccactccaaccaagttgaaacgctgaagatcctgttggtgcatttaatcaaaaatgaaccgttggacgatccctttattcctgagagcattttggtgcaaagccccggcatgtcgcagtggctgaaaatggcgctggccagtgaattaggggttgccgcgaatcttgagtttcctctaccggcaacctttatctggcagatgtttactcaagtgttgcccgatgtgccgcagcgcagcgccttcaataaagaagccatgagttggcgtttgatggagctactgcctaagctgcttgaccgcaccgaattccaaccgctgcaacgctatttacaagacgatgaagatgattctaagcgcttccaattagcggaaaaaattgccgatatttttgatggttacttggtgtatcgccccgattggattttaagttgggaagcaggggaagacgtggtggaaatcgctgaccaacacccgtggcagccgattttgtggcgtgaactctacgcttacacgcataagcaagggcactcgatttatcaccgtgccaacctctatcagcgttttattgagcagttggcgagtggcgactttgatcgcagcacatggcctaagcgcttgttcatcttcggtatttctgcgctgccgccccgttatattgatgcgctgcgtgcgatgggggagcatatcgatgtgcacctgatgctgaccaacccttgtcagcactattggggcgacatccgtgaccgtaaatatctggcgcgagtggcagcgcaaaaacgcaaaatcctgcaaattaatggtgagcaagtcaccatcggcagtgaagtctcgccgctcaaaggcgatgtggaaaactatctgcaagagtcgatgcacctgagtcacgcggtgggcaatagcttactggcttcgatgggcaaaatggggcgcgataatctctatcttcttgcacaaaacgatcagtctgaattagagctgtttattgagattcaacgcgactcgctgctgcatcacatccaagcagatattttgcatctgcaagagcatcaagacgatgccaagtttgccagcagcggtcataaacccagcattgccgcgcaggatgattccctgcagattgccctatgtcacagcccaattcgtgaagtagaagtgctgcacgaccgactgctggccgagtttgagcgtgaccctagcctaaaaccgcgcgatgtaattgtgatggtgccagacattaacgcctacgcgccttacattcaggcggtgtttggcaatgcgcccggcgagcgttttattccgttttcaatttccgatcgcagcgccgatcaagaaagcccgattttaaccgccttcttgcaactgctcgcgctgccgcaatcacgctgtctggcttctgaactgcttgagctacttgaaaccccggcgattatggcgcgttttgcgattgacgaagaagagtttgccactgccaaacgttgggtcgaagaagcgggcattcgttgggggctgaatagtgacactggcgcagagtttgaattgcccgccagtgaacaaaatacgtggcagtttggcattgaacgtatgttactgggttacgccatgccggctgaagcggggttgtatgaacttggcggccagtggcttgccccctataaccaagtgcaaggcatgagcgccgagttggcgggtaagctagcacactttgtgcaaacgctcagcgagctgcgtagccaactggcgcaaactcaaagcatggagcagtggcgttattggctcaacgagctgctagagcgctgttttagtgtcgatctgcaaggtgagctggcgctgaaaaccatccgcgatagtttggtgaacctaaaacagcagttggccgacgcgggctaccaacaagcggtttcaccggccatcattcgccaagtgctgaccaataaactctccggcacgcggattagccaacgctttttagcgggacaagtgaacttctgtaccctgatgccgatgcgttcgatcccgtttcgccgagtttgcctgcttggcatgaatgatggtgtttatccacccaatgaaatggtggaagggtttgacctgcgcaatgtgcagcgccgagtcggcgaccgttcacggcgtgaagagtcgcgctacctgttcctcgaagccttgttgtcagccaaagagcagctgtatatcagctatgtcggccgctcgattcaagataacagcgaacgcgtgccttcagtgctggtcagtgagcttttggaatattgcgagcagaactactgcttggctggcgatgaaaatctagaaagtgatgactccggacgtcgcttggttgagcacttaaccacccagtatcctatggtgccgttcagcccgcaggcgtttatcgctggcagttttgcccgtgaatggctacctgccgcgcgccgccaagggcagagtagcgccgattttctcacgccactcagtgattatctgctcgaagtgagttggccgatggagctggatctggtcgagctgcaacgtttttggcgtctgccggtggagtatttcttcaaacgccgcttgaaagtgagctttgagccgccgctggccgtgctggaagacgatgagccgtttgctttggatggattgagcgcgtatcagctgcgtgatgagttggtggaaaatctgctcgcttgccgtgatggcgcagagcgcgaccaagtggtggcgcagtttgctaagcagcaacgagcgcaaggcaagttgcctgtggcagcgtttggcgatcttgaattggcgcaaagtgcgcagcaagctttggcgctggcggaaaaaattggctttttgtgtcaccaaccactggaagatgaagagattgatctacgcttacagccctttgacgatggccgagaagtcttactacgtggttggctcgtgaagcgttatcaatctggcttggtgcgcgcacgcagtggcgcgattcgctcggaagatttattagccgcatggattgatcatctctgcttggcggcgagcggcaaagccgtcacgacccatttgattggttatgagcgcaaagaaggagtgcagcaccaaatgctgccgccacttaatgacgcgcagcaagccaagacgctactgagtgaactggtggcgctgttttgccaaggcatgaaccagcctttggcttatttcccgaaaacggcgttggcttgcgttgaggccggattttcccgtggcaaatggcaggaagatgaagagaagtcctacaagaaaatggcggacaccttcaacgatagcttttacatcaagggtgaaggcggtaatcgctacatcgcgcgtatttggccgcagtggagtgatgaactggcaaaaacgctgcgccaattggccatcaaagtgctgcaaacaccgcgtttacaagtgcaagatgccgaacaggtttaa

SEQ ID NO: 157133 - protein, 1148 aa, Vibrio cholerae O1 biovar eltor str. N16961
MFTVYHSNQVETLKILLVHLIKNEPLDDPFIPESILVQSPGMSQWLKMALASELGVAANLEFPLPATFIWQMFTQVLPDVPQRSAFNKEAMSWRLMELLPKLLDRTEFQPLQRYLQDDEDDSKRFQLAEKIADIFDGYLVYRPDWILSWEAGEDVVEIADQHPWQPILWRELYAYTHKQGHSIYHRANLYQRFIEQLASGDFDRSTWPKRLFIFGISALPPRYIDALRAMGEHIDVHLMLTNPCQHYWGDIRDRKYLARVAAQKRKILQINGEQVTIGSEVSPLKGDVENYLQESMHLSHAVGNSLLASMGKMGRDNLYLLAQNDQSELELFIEIQRDSLLHHIQADILHLQEHQDDAKFASSGHKPSIAAQDDSLQIALCHSPIREVEVLHDRLLAEFERDPSLKPRDVIVMVPDINAYAPYIQAVFGNAPGERFIPFSISDRSADQESPILTAFLQLLALPQSRCLASELLELLETPAIMARFAIDEEEFATAKRWVEEAGIRWGLNSDTGAEFELPASEQNTWQFGIERMLLGYAMPAEAGLYELGGQWLAPYNQVQGMSAELAGKLAHFVQTLSELRSQLAQTQSMEQWRYWLNELLERCFSVDLQGELALKTIRDSLVNLKQQLADAGYQQAVSPAIIRQVLTNKLSGTRISQRFLAGQVNFCTLMPMRSIPFRRVCLLGMNDGVYPPNEMVEGFDLRNVQRRVGDRSRREESRYLFLEALLSAKEQLYISYVGRSIQDNSERVPSVLVSELLEYCEQNYCLAGDENLESDDSGRRLVEHLTTQYPMVPFSPQAFIAGSFAREWLPAARRQGQSSADFLTPLSDYLLEVSWPMELDLVELQRFWRLPVEYFFKRRLKVSFEPPLAVLEDDEPFALDGLSAYQLRDELVENLLACRDGAERDQVVAQFAKQQRAQGKLPVAAFGDLELAQSAQQALALAEKIGFLCHQPLEDEEIDLRLQPFDDGREVLLRGWLVKRYQSGLVRARSGAIRSEDLLAAWIDHLCLAASGKAVTTHLIGYERKEGVQHQMLPPLNDAQQAKTLLSELVALFCQGMNQPLAYFPKTALACVEAGFSRGKWQEDEEKSYKKMADTFNDSFYIKGEGGNRYIARIWPQWSDELAKTLRQLAIKVLQTPRLQVQDAEQV

SEQ ID NO: 157134 - DNA, 3375 bp, Pasteurella multocida subsp. multocida str. Pm70
  CDS (1)..(3375): transl_table=11
atgtttacaatttattattctaatgatcttgatgtacaaaaaaatattttgctcacgttaatgcaagatacactggatgatccctttcagtcagacgtgattttagttcaaagtccaggcatggcacagtggttgcaatggaaaattgcggagcagcaagggatttcgagtaatattaagtttcctatgcctgcgagctttatttggcaacaatacgtagacaatttaccgaatacagaggaacaaagccaatttaataaagcgtcgatgacatggcgtttaatgcgtttaattcccgaacatcttgaacaagtcgaatttcaatcacttcgtcattatttatcttcttctcatcaaacagaacaacaaaagttgtaccaattagcctaccaaattgctgatttatttgaccaatatcttgtttaccgcccagaatggatcgcttgttgggagcgtggtgatgaagccactatgatggcacagttagaacgcaagctaaaagatacacgcctaccaataggcaacgctttttctcaagatgttaaatggcaagcgatactatggcgtgctctagtggcggatattttggctgaaagcggtcagactgttcccttacatcgtgcttatttacaaacacaatttttgcagttcttacagacccagcatcctgtcaatttacctccacgtcttttcatttttggtatctcagcgttgccaaaaggctatttagaaattttttatgccatgagtcagtattgtgaagtacatttattttttaccaatggctgtcgtgaatattggggtgatttaattgatccgcgttttatgcaacgcttaagccaaatgcaacgaactggctaccataccgctttacctatacctgtttttcaccatacagataatgcccgatttgaatcaagttatgatcatgagcatttatttgaggggcatcctttgctgtcaagctgggggaaattgggacgagattttttatatttattaacagaattagaacagctcgaaggcgtacgaagtattgatgcgtacaccgagttaacttcccaacatctcttatctcaggtacaagcgcgtattttacatttagaaggcaagcaaggtttaaatttggctgaaaatgaccgctctttaacgttccattcttgccatagccctatgcgtgaagttgaagttttacatgactatttgcttcatttatttcagcaagactcgacacttactccaaaagatattgtggtgatggtagcggatattgataaatatacaccctatattcaagctgtatttggacagtacaatcaggtcgcacagcggcagattcctttttctatttcggataaccgtctttctgaaaatgacgtgttaatagcaagttttattcacttacttgctttaaaagagagtcagtttagcgcagaagatatcttagctttattagatattcctgcgattcggaataggtttcagattgagttaatggagttagagcagattcggcattgggtcgcacatgctggcatacgttttggtgtagaaaaagaacaaggtaaacaagaaaagaacactaactcatggcaagctgggctggagcggatgctgcttggttatgcgatgcgtgaggaaaatgggatttggcaagggaatttaggctttgatccttgttatggactacaagggcaattagccggacgcttggcggagtttattgcaagattatcagcatggtatcagtttttacaaacgcctcagcctattgaaaaatggcaacagcatttacttacgcttttaacagatttcttcgctgaggatgaaacgaatattaccactttgcgatatattcaagaaacgatagtgcaaatggtaacagatattcaacaaacacattttgatcaaccgttaagtagtgaagtggtttctgatgtcctgtcggcattattagaagatgatccgaatagcatgaagtttctggcagggaaagtgaatttctgcaccttgctaccgatgcgttcgattccctttaaagtagtgtgtttactggggatgaatgaaggtgattatcctcgtcaacaaacgccaaatagctttgatttgatgcaatatgatcgacgtaaagccgaccgttttcgccgtgacgatgattgttatttgttccttgaagcgctgctgtcagcacaagaggcattttatgtgagttttgtgggacgttccattgtggataaccaaagcaaacctccgtctgtgttagtcagtcaattgattgactatttagtagataagttatcaagcgctgaaacacaagattggcaggctcgattaattgaacagcatccgatgacagcatttagtccagataatttccgaggagaaaacggatcttttgctaaccaatggttacccctagcaaatattcagaaacaagagagggcggattttgtccaacctatcgcacaaacagtgttagccgaggatcgtgaaattgtgttagcggatttaattgcctttattcagcaccctgttgcgtttttctttaaacgtcatttaggcgtttcttttgctaaacaagaagaacgtattgaagacagcgaaaattttactttagatggcttaatgcgctatcaaattaatgagcaattgctttattgtgatgaggaaaaaagcgcggaggttctcgctcaattaaaagtaaaaggtatgctaccgcgtggtgaatttgcccagatctttgcgttacaacaacaagaagacattgccgcgttaaaaacaaccgttgccgattatttaaaacaagaggcgcatgtcgtcgaagtggatttgactatcccgagtggctatggcgatattcgtctgattgggctgctagatcagttgtatgcacagcgtagagtgatgtggcgagtgggacaaattcaggaaaaacatttaattgaaaattgggtgtattaccttattcaatgtgcaatgttagcacagcatgaacctcctatttattatggtaagaatgggcaagcgacctttcaagcgttgtgtgctagcgagtcgttaagtgtaaaagaaatcgcgttagcacaattacaaatctatgttgaaagttatttgcagggctatcagcagatgcaaatggttccgatgaaaaatattcaacgttatttagaagcatatggacatactgagacgccagattttgagatgattcggacattgttacatcatctagcggaaggggattatgcttcggatggggatatttattggcaacgagtacttgcacaacaagtactcgatgaggagaggctcaacgcgataggcgaacggacaacatcgtggtttaagcttatgtttgagcagcttgaaaaatag

SEQ ID NO: 157135 - protein, 1124 aa, Pasteurella multocida subsp. multocida str. Pm70
MFTIYYSNDLDVQKNILLTLMQDTLDDPFQSDVILVQSPGMAQWLQWKIAEQQGISSNIKFPMPASFIWQQYVDNLPNTEEQSQFNKASMTWRLMRLIPEHLEQVEFQSLRHYLSSSHQTEQQKLYQLAYQIADLFDQYLVYRPEWIACWERGDEATMMAQLERKLKDTRLPIGNAFSQDVKWQAILWRALVADILAESGQTVPLHRAYLQTQFLQFLQTQHPVNLPPRLFIFGISALPKGYLEIFYAMSQYCEVHLFFTNGCREYWGDLIDPRFMQRLSQMQRTGYHTALPIPVFHHTDNARFESSYDHEHLFEGHPLLSSWGKLGRDFLYLLTELEQLEGVRSIDAYTELTSQHLLSQVQARILHLEGKQGLNLAENDRSLTFHSCHSPMREVEVLHDYLLHLFQQDSTLTPKDIVVMVADIDKYTPYIQAVFGQYNQVAQRQIPFSISDNRLSENDVLIASFIHLLALKESQFSAEDILALLDIPAIRNRFQIELMELEQIRHWVAHAGIRFGVEKEQGKQEKNTNSWQAGLERMLLGYAMREENGIWQGNLGFDPCYGLQGQLAGRLAEFIARLSAWYQFLQTPQPIEKWQQHLLTLLTDFFAEDETNITTLRYIQETIVQMVTDIQQTHFDQPLSSEVVSDVLSALLEDDPNSMKFLAGKVNFCTLLPMRSIPFKVVCLLGMNEGDYPRQQTPNSFDLMQYDRRKADRFRRDDDCYLFLEALLSAQEAFYVSFVGRSIVDNQSKPPSVLVSQLIDYLVDKLSSAETQDWQARLIEQHPMTAFSPDNFRGENGSFANQWLPLANIQKQERADFVQPIAQTVLAEDREIVLADLIAFIQHPVAFFFKRHLGVSFAKQEERIEDSENFTLDGLMRYQINEQLLYCDEEKSAEVLAQLKVKGMLPRGEFAQIFALQQQEDIAALKTTVADYLKQEAHVVEVDLTIPSGYGDIRLIGLLDQLYAQRRVMWRVGQIQEKHLIENWVYYLIQCAMLAQHEPPIYYGKNGQATFQALCASESLSVKEIALAQLQIYVESYLQGYQQMQMVPMKNIQRYLEAYGHTETPDFEMIRTLLHHLAEGDYASDGDIYWQRVLAQQVLDEERLNAIGERTTSWFKLMFEQLEK

SEQ ID NO: 157136 - DNA, 3516 bp, Pseudomonas aeruginosa PAO1
  CDS (1)..(3516): transl_table=11
atgccagaacccttgggaaccaccgctctcacgcccggattcatgatcgtccacggcaatcgcctggacgacctgcgcgacctcgccgtttcctggatgcgccgctatccgctggcgccgctggaaagcgagcgggtcctggtgcacagcaacggcatcgcccaatggttgaagctggcattggccgaagatccccgcgaggacggcggcggcggtggcggcatcgccgcggcgctggaggtgcagttgccggcgcagttcctctggcaggcctatcgcgcggtgctgggccgcgaaagcattcccgaggtttccgaactggacaaggcgccgctgacctggcgcctgatgcgtctgcttcccggattgctggagcgtcccgagttccgcaccctgcaacgtttcctcgccgacgatgccgacctgcgcaagcgtcatcaactggccgagcgcctggccgacctgttcgaccagtaccaggtctatcgcggcgactggctcgacgactggagccagggccgcgaccagttgcgcacggcgaacgggcaggcgcgcccgctcggtgccgacgagcgctggcaggccgaattgtggcgcgcgctgctcgccgacgtcggtgccgatagcctggcccgcagccgctccggcgtgcaccggcgcttcatcgaggcgctgcgctccgccagcgcggcgccgcgcgcgttgccgcgacgagtggtggtgttcgggatttcctcgatgccggcgcagaccctcgaggcgctggccgccctggccaggttcagccaggtgctgctctgcgtgcacaacccctgtcgccaccactgggccgacatcgtcgccgacaaggacctgttgcgccacgagtaccgccgccagcagcgccgcgccggcgtccccgccgacctcgacgaggaccgccagcaccagcatgcccagccgttgctggcggcctggggcaagcagggccgcgactacatcaacctgctcgacagctacgacgacccggacagctatcggaacctgttcggcgaggtcaacggcgggcgcatcgacctgttcagcgaggagaccccgcacgggctgctcggccagttgcaggacgatatcctcgaactgcgcccgttggcggaaacccgcgagcactggccgccggtggcgccgcggagcgacgcctcgatccgcttccatgtggcccacagcgcgcagcgcgaagtggagatcctccacgaccagttgctcgcccgcttcaacgccgatccgagcctgaagccgcgcgacgtgatcgtcatggtccccgacatcaacgcctacgcgccgcacatcgaggcggtgttcggccaggtgccgcgcgacgaccagcgcttcattccctataccctggccgaccagggacagcgcggtcgcgagccgctgctgatcgccctggagcatctgctgaaactgcccgacagccgtttcgccgtgagcgagatcctcgacctgctggacgtcccggcattgcgccggcgtttcggcgtcgacgaggccgacctggcgaccctgcaccgctggatcgaaggcgccggcgtgcgctgggggctggatgccgcgcagcgcgagcgtctcggcctgccagcgggactggagggcaacagttggcgcttcggtctgcggcgcatgctgctcggctacgcggtcggcgaaggcgcggccctgcaaggcatccagccctacgatgaggtcggtggtctggacgccgccctggcaggcccgctggctgtgctgctggagcgcctcgaggtggcctacgccgagctggccgaaccggccaccccggcgcagtggggcgagcgcctgcaagccctgctcacggtgttcttcgaggcccacgacgagcgcgacgaactgcttctcacccagctcctgcaattgctcgagcgctggcaggaacactgcgcttgtgcggccttcgccgagccgctaccgatcagcgtgatacgcgaggcctggctcggcggcctggaccagggcggcctgaaccagcgcttcctggctggcgcggtgagtttctgcacgttgatgccgatgcgcgcgatcccgttccggctggtctgcctgcttggcatgaacgatggcgactacccccgccagcagtcgccgctggatttcgacctgatgcgcaacgactaccgccccggcgaccgctcgcggcgcgaggacgaccgctacctgctgctcgaggcgctgctctcggcgcgcgagcaactctacgtgagctgggtggggcggagtatccgcgacaatggcgagcggccgccctcggtgctgatcggccagttgcgcgatcacctggcggccggctggcgcctggatccggacggcgacggcgaggcgctgctgcgtgccctgacccaggagcatccgctgcagccgttcagccgccggtattttcacgatgcgccggagcagggcgtcgatggcctgttcacctacgcccgcgagtggcgcgaggtccatcgcgaggacgagatcggcgttcccgacgccgaagcgcccctgccgccgctggagctggagggcgcgctggggctgcgagcgctggcggagttcctcgccaacccggtgaatgcgttcttccagcagcggctcaaggtgcgtttcgacgacgagcaattgaccggcaacgacgaagagcctttcgaactggacgcgctggacaactggaagctgcaattcgagctgaccgaacgcatgaagcgctgggtcgagcgggactgggatgccgagggcctgccggtgcagttgcaggcccaggtcgagcgactgcggcgacagggtcgcctgccgctggcggcgttcggcgagttctccgcgcgccatttgctgcaaccgctgcccgacctgctctggcgctaccgccaggaaatcgagcgctggccggaggcggtcgagcagcagcaggagttgcgccatcgccatccgtccgggctggagctggaggactggctcggcggcttgcgtcgcgacgcttccgggcgcctggcgcgcctgcaattgctcagcggcaagctccatgaggggcgcagcttcaagtggcacagcctggtacgccactggttgcagcacctcgccctgcaacgtctaggccagccggtgagcagcgtgctggtgagccagaccggcaccctggagattccgccgttgccgagcgagcgtgccagcgagtacctcgaccagttgatcgacgcctggcgccagggcatgcgccagccgttgccgctggcctgccggaccgctttcgcctggctcgccagtggtggcgccgcagagcccgagaaagccatgcgcgaggcgcgcaagcgctacgagggagggttcggcatggggggcgaggtggacgcctcgccggcgctggctcgggtctatccggacttcgaccggctgctcgccagcggtgagttcgcgcactgggccgagcagctctacgcgccgctgctggctgccctgggacgtggcgcggaggagcaggcatga

SEQ ID NO: 157137 - protein, 1171 aa, Pseudomonas aeruginosa PAO1
MPEPLGTTALTPGFMIVHGNRLDDLRDLAVSWMRRYPLAPLESERVLVHSNGIAQWLKLALAEDPREDGGGGGGIAAALEVQLPAQFLWQAYRAVLGRESIPEVSELDKAPLTWRLMRLLPGLLERPEFRTLQRFLADDADLRKRHQLAERLADLFDQYQVYRGDWLDDWSQGRDQLRTANGQARPLGADERWQAELWRALLADVGADSLARSRSGVHRRFIEALRSASAAPRALPRRVVVFGISSMPAQTLEALAALARFSQVLLCVHNPCRHHWADIVADKDLLRHEYRRQQRRAGVPADLDEDRQHQHAQPLLAAWGKQGRDYINLLDSYDDPDSYRNLFGEVNGGRIDLFSEETPHGLLGQLQDDILELRPLAETREHWPPVAPRSDASIRFHVAHSAQREVEILHDQLLARFNADPSLKPRDVIVMVPDINAYAPHIEAVFGQVPRDDQRFIPYTLADQGQRGREPLLIALEHLLKLPDSRFAVSEILDLLDVPALRRRFGVDEADLATLHRWIEGAGVRWGLDAAQRERLGLPAGLEGNSWRFGLRRMLLGYAVGEGAALQGIQPYDEVGGLDAALAGPLAVLLERLEVAYAELAEPATPAQWGERLQALLTVFFEAHDERDELLLTQLLQLLERWQEHCACAAFAEPLPISVIREAWLGGLDQGGLNQRFLAGAVSFCTLMPMRAIPFRLVCLLGMNDGDYPRQQSPLDFDLMRNDYRPGDRSRREDDRYLLLEALLSAREQLYVSWVGRSIRDNGERPPSVLIGQLRDHLAAGWRLDPDGDGEALLRALTQEHPLQPFSRRYFHDAPEQGVDGLFTYAREWREVHREDEIGVPDAEAPLPPLELEGALGLRALAEFLANPVNAFFQQRLKVRFDDEQLTGNDEEPFELDALDNWKLQFELTERMKRWVERDWDAEGLPVQLQAQVERLRRQGRLPLAAFGEFSARHLLQPLPDLLWRYRQEIERWPEAVEQQQELRHRHPSGLELEDWLGGLRRDASGRLARLQLLSGKLHEGRSFKWHSLVRHWLQHLALQRLGQPVSSVLVSQTGTLEIPPLPSERASEYLDQLIDAWRQGMRQPLPLACRTAFAWLASGGAAEPEKAMREARKRYEGGFGMGGEVDASPALARVYPDFDRLLASGEFAHWAEQLYAPLLAALGRGAEEQA

SEQ ID NO: 157138 - DNA, 3210 bp, Neisseria meningitidis MC58
  CDS (1)..(3210): transl_table=11
atgttttatctgtatcaatccaaccgtcttgaaacgctggcggcattgtttgcccgcattcaaaaagtcaaaccgctgaaatcggctttacagcccgaacagattattgtgcagagtcaggggatgcgccgctacctcaatacctgcctcgcccgcgatttgggcgtggcggcgaatttgtcgttcagcctgcccgccggcctgacgtggaagctgatgaaaaaactgattcccggtattccggaactcagcccgtttgcgcccgaagtcatgcgctggcggctgctggatttgttccgcagcgaggcatttcggaatacggcagaatttgaagatgtgaggaatgtgctgcaagactatctgggcagcggcgaatcggcagattaccagcttgcgggacagcttgcggacatattcgaccaatacctcgtgtaccgtcctcagtggatagacgcttggcagcagggcaggcggctcggtttgggcgacgacgaaatctggcagtccaaactgtggcgttacctcgacgacggcaggcagagcgcgccgcaccgtgtcgcgttgtgggaaaagctgttggaatctttgagcagtgataagctgcccgagcgttatttcgtgttcggcatttccacgatggcgccgatgtatttgcaacttttgcacaagctgtccgaacattgcgacgtgttcgtgttcgcactcaatccgagcgggatgtactggggcaacgtcatcgaagcggcgcaaatcctcaaaggtggcggcgatcccgatttaactcaggcagggcatccgctgctcgcctcattgggcaagcaggggcgggactttttcgactttttgaacgaaatggaaatagaaggcgaaacgccggtatttgaggaaggcgggcgcgatacgcttttacacgccctgcaaaccgatattcaaaacctgaaaatgccgtctgaaatggcgggaagcgtcaacacgggcgacggctcgatacgcatcgtctccgcacacagccctttgcgcgaattgcagatactcaaagacaagctgttgaaaattctgcatgaacatcccgattggcagccgcacgatatcgccgtattaaccccgaatatcgaatcctatacgccttttatcgaagccgtgttcggacaggcgcagcccggtgcgcaggcattgccgtattccgtgtcagacgtgaaaatcagccgccgccaaccgctgtttcatgctttgtcatgcctgttcgacttgttggaaagccgatttgaagtcgataaagtgcttgtgcttttagaaaccgcgcccgtgttgcgccgtttcggactgactgaggacgatttaccgcttttgcacgacatggttgccgatttgaacgtccactggggtttggacggagaaatgcgcggcggcacggatcagctgttcacctggaagcaggcggtagaacgcatgatattgggctggatgctgcccaaaggcggcaatccgatgtggcaggatgtcagcgcgtggtatgccgacgtgaatcaaaccgccatgttcggacgttttgccgccttcctcgaaaccctgacggatattgtacggatatggcggcagcccgcaacggtcggcgaatgggtggcgcgttgccgggatttgcttgaaacattgttccaagctgaagccgatgaccaaaagtcagtccaaaaccttgaaaacgaatgggtcaaatggcaggcggaaaccgaattggcgcaattttccggacagttgccgccgcacaccgtcatccgccatatccgacgctttctcgacagcgaaagcgaggcaggctttttacgcggcggcatcaccttttgcagtatggtgccgatgcggagcctgccgttcaaagtcatctgcctgttgggtttgaacgacggagattttccccgtaataccaaagccgccgtattcgacctgattgccaaacatcccgccaaaggagaccgcgcccgccgcgatgacgaccgctacctgttcctcgaagccctcatcagcgcgcgtgaaatcctctacctgtcctacatcgggcgcgacatccgcaaagacgaagagcttgccccgtcttccctgttgggcgaactcatcgataccgttgccgctatggcgggcatcggtagccgccaacttgcacaaaacctgatagaacagcatccgctgcaagccttctcgcgccgatattttcaagaaggcggacgttcagacggcatattcggcacgcgtaccgactacgccgccgcgctcggacaaacgcccgaaccgccgcaaccctttttcgatcaacccgtagaaaacgccgaacctgttgccgaaatcggacaggacgaatttatccgtttctggcgcaaccctgtcaaagtatggcttcagcagcagcttgcgtggagcgaaccccatatcggcgaagcctgggagcctgccgaacccttcgagccgcaacacgccgatcaaatcgccgaaatctacatcgaagcacggtgcgaaggacgggattttgcccaaaccgccgcccgcatcggggcggaaagcctcctgccgtcgggagagttgggcagactttggcagcaggacttccaaactgctgccaaacaaatcgacacggcggttttaaacagccccaaactgccaccgctttcatatgccataccgtcggacgggcaaatcctgaaaggcagcttgggcaatctgtaccgctgcggacaagtgttttacgcctacggcaaacccaacgcgccgcaacgtatcgcttttctgctggaacacctgatattttgcgccgttatgccgtctgaagccgaaatgcggcaaacctttatcgtccaatccggagaaaccgaaatattggcggaaatcgcgcaagacagggcattgcagctattgtcggaatggatggcgtttttcaatatcgggcaaaaccgcccgctgccgttttttgccaaaacctcgcttgccaccgccgaagcgtttgcccaaaaacaagattgggaagccgccctgaaaaaagcccaaaccgcctaccacggcagcaaagtcagcaaagggcagaaagactataccgaagtcgccctcgtgttcggcaacgcaagccaaaacccgctcgaacagcccctgtttgaaaacctcgtccgtctgcttgccgacacgcttgccgcagcggaaaaaaaggaagaggccggagaagcctga

SEQ ID NO: 157139 - protein, 1069 aa, Neisseria meningitidis MC58
MFYLYQSNRLETLAALFARIQKVKPLKSALQPEQIIVQSQGMRRYLNTCLARDLGVAANLSFSLPAGLTWKLMKKLIPGIPELSPFAPEVMRWRLLDLFRSEAFRNTAEFEDVRNVLQDYLGSGESADYQLAGQLADIFDQYLVYRPQWIDAWQQGRRLGLGDDEIWQSKLWRYLDDGRQSAPHRVALWEKLLESLSSDKLPERYFVFGISTMAPMYLQLLHKLSEHCDVFVFALNPSGMYWGNVIEAAQILKGGGDPDLTQAGHPLLASLGKQGRDFFDFLNEMEIEGETPVFEEGGRDTLLHALQTDIQNLKMPSEMAGSVNTGDGSIRIVSAHSPLRELQILKDKLLKILHEHPDWQPHDIAVLTPNIESYTPFIEAVFGQAQPGAQALPYSVSDVKISRRQPLFHALSCLFDLLESRFEVDKVLVLLETAPVLRRFGLTEDDLPLLHDMVADLNVHWGLDGEMRGGTDQLFTWKQAVERMILGWMLPKGGNPMWQDVSAWYADVNQTAMFGRFAAFLETLTDIVRIWRQPATVGEWVARCRDLLETLFQAEADDQKSVQNLENEWVKWQAETELAQFSGQLPPHTVIRHIRRFLDSESEAGFLRGGITFCSMVPMRSLPFKVICLLGLNDGDFPRNTKAAVFDLIAKHPAKGDRARRDDDRYLFLEALISAREILYLSYIGRDIRKDEELAPSSLLGELIDTVAAMAGIGSRQLAQNLIEQHPLQAFSRRYFQEGGRSDGIFGTRTDYAAALGQTPEPPQPFFDQPVENAEPVAEIGQDEFIRFWRNPVKVWLQQQLAWSEPHIGEAWEPAEPFEPQHADQIAEIYIEARCEGRDFAQTAARIGAESLLPSGELGRLWQQDFQTAAKQIDTAVLNSPKLPPLSYAIPSDGQILKGSLGNLYRCGQVFYAYGKPNAPQRIAFLLEHLIFCAVMPSEAEMRQTFIVQSGETEILAEIAQDRALQLLSEWMAFFNIGQNRPLPFFAKTSLATAEAFAQKQDWEAALKKAQTAYHGSKVSKGQKDYTEVALVFGNASQNPLEQPLFENLVRLLADTLAAAEKKEEAGEA

SEQ ID NO: 157140 - DNA, 3210 bp, Neisseria meningitidis Z2491
  CDS (1)..(3210): transl_table=11
atgttttatctgtatcaatccaaccgtcttgaaacgctggcggcattgtttgcccgcattcaaaaagtcaaaccgctgaaatcggctttacagcccgaacagattattgtgcagagtcaggggatgcgccgctatctcaatacctgcctcgcccgcgatttgggcgtggcggcgaatttgtcgttcagcctgcccgccggcctgacgtggaagctgatgaaaaaactgattcccggtattccggaactcagcccgtttgcacccgaagtcatgcgctggcggctgctggatttgttccgcagtgaagcattccggaatacggcagaatttgaagatgtgaggaatgtgctgcaagactatctgggcagcggcgaatcggcagattaccagcttgcgggacagcttgcggacatattcgaccaatacctcgtgtaccgtcctcagtggatagacgcttggcagcagggcaggcggctcggtttgggcgacgacgaaatctggcagtccaaactgtggcgttacctcgacgatggcaggcagagcgcgccgcaccgtgtcgcgttgtgggaaaagctgcttgccgcgttggacaaggataagctgcccgagcgttatttcgtgttcggcatttccacgatggcgccgatgtatcttcagcttttgcacaagctgtccgaacattgcgatgtgttcgtgttcgcactcaatccgagcgggatgtattggggcaacgtcatcgaagcggcgcaaatcctcaaaggcggcggcgatcccgatttaactcaggcagggcatccgctgctcgcctcattgggcaagcaggggcgcgactttttcgactttttgaacgaaatggaaatagaaggcgaaacgccggtatttgaagaaggcggacgcgatacgcttttgcacgccctgcaaaccgatattcaaaacctgaaaatgccgtctgaaaatgtgggaagcgtcggtacggatgacggttcgatacgtatcgtctccgcgcacagccctttgcgcgaattgcagatactcaaagacaagctgttgaaaattctacatgaacatcccgattggcagccgcacgatatcgccgtattaaccccgaatatcgaatcctatacgccttttatcgaagccgtgttcggacaggcgcagcccggcgcgcaggcattgccgtattccgtttcggatgtgaaaatcagccgccgacaaccgctgtttcatgctttgtcatgcctgttcgacttgttggaaagccgatttgaagtcgataaagtgcttgtgcttttagaaaccgcgcccgtgttgcgccatttcggactgactgaggacgatttgccgcttttgcacgacatggttgccgatttgaacgtccgctggggtttggacggagaaatgcgcggcggcacggatcagctgttcacctggaagcaggcggtagaacgcatgatattgggctggatgctgcccgaaggcggcaatccgatgtggcagggggtcagcgcgtggtatgccgacgtgaaccaaaccgccctgttcggacgttttgccgccttcctcgaaaccctgacggatattgtacggatatggcggcaacctgcgacggttgacgaatgggtggcgcgttgccgggatttgcttgaaacattgttccaagtcgaaggcgatgaccaaaaggcagtccaaagcctcgaaaacgaatgggtcaaatggcaggcggaaaccgaattggcgcaattttccggacagttgccgctgcacaccgtcatccgccacatccgccgcttccttgacagcgaaagcgaggcgggctttttacgcggcggcataaccttttgcagtatggtgccgatgcggagcctgccctttaaagtcatctgcctgctgggtttgaacgacggagattttccccgcaataccaaagccgccgtattcgacctgattgccaaacatcccgccaaaggcgaccgtgcccgccgcgacgacgaccgctacctgttcctcgaagccctcatcagtgcgcgtgaaatcctctacctgtcctacatcgggcgcgacatccgcaaagacgaagaactggctccgtcttcgctgttgggcgaactcatcgacacagttgccgccatgaccggcacaaacagccgccaacttgcacaaaattggatagaacagcatccgctgcaagccttctcgcgccgatatttccaagaaggcggacgttcagacggcatattcggcacgcgtaccgactacgccgccgcgctcggacaaacgcccgaaccgccgcaaccctttttcgaccaacccgtagaaaacgccgaacctgttgccgaaatcggacaggacgaatttatccgtttctggcgcaaccccgtcaaagtatggcttcagcagcagcttgcgtggagcgaaccccatatcggcgaagcctgggagcctgccgaacccttcgagccgcaacacgccgatcaaatcgccgaaacctacatcgaagcacggcgcgaaggacgggattttgcccaaaccgccgcccgcatcggggcggaaagcctcctgccgtcgggagagttgggcagactttggcagcagaacttccaaactgctgccaaacaaatcgacacggcggttttaaacagccccaaactgccaccgctttcatatgccataccgtcggacgggcaaatcctgaaaggcagcttgggcaatctgtaccgctgcggacaagtgttttacgcctacggcaaacccaacgcgccgcaacgtatcgcttttctgctggaacacctgatattttgcgccgttatgccgtctgaagccgaaacgcggcaaacctttatcgtccaatccggagaaaccgaaatattggcggaaatcgcgcaagacagggcattgcagctattgtcggaatggatggcgtttttcaatatcgggcaaaaccgcccgctgccgttttttgccaagacctcgcttgccgctgccgaagcgtttgcccaaaaacaagattgggaagccgccctgaaaaaagcccaaaccgcctattacggcaacaaagtcagcaaagggcagaaagactataccgaagtcgccctcgtgttcggcaacgcaagccaaaacccactcgaacaacccctgtttgaaaacctcgcccgcctgcttgccgacacgcttgccgcagcggaaaaaagggaaggggccggagcagcctga

SEQ ID NO: 157141 - protein, 1069 aa, Neisseria meningitidis Z2491
MFYLYQSNRLETLAALFARIQKVKPLKSALQPEQIIVQSQGMRRYLNTCLARDLGVAANLSFSLPAGLTWKLMKKLIPGIPELSPFAPEVMRWRLLDLFRSEAFRNTAEFEDVRNVLQDYLGSGESADYQLAGQLADIFDQYLVYRPQWIDAWQQGRRLGLGDDEIWQSKLWRYLDDGRQSAPHRVALWEKLLAALDKDKLPERYFVFGISTMAPMYLQLLHKLSEHCDVFVFALNPSGMYWGNVIEAAQILKGGGDPDLTQAGHPLLASLGKQGRDFFDFLNEMEIEGETPVFEEGGRDTLLHALQTDIQNLKMPSENVGSVGTDDGSIRIVSAHSPLRELQILKDKLLKILHEHPDWQPHDIAVLTPNIESYTPFIEAVFGQAQPGAQALPYSVSDVKISRRQPLFHALSCLFDLLESRFEVDKVLVLLETAPVLRHFGLTEDDLPLLHDMVADLNVRWGLDGEMRGGTDQLFTWKQAVERMILGWMLPEGGNPMWQGVSAWYADVNQTALFGRFAAFLETLTDIVRIWRQPATVDEWVARCRDLLETLFQVEGDDQKAVQSLENEWVKWQAETELAQFSGQLPLHTVIRHIRRFLDSESEAGFLRGGITFCSMVPMRSLPFKVICLLGLNDGDFPRNTKAAVFDLIAKHPAKGDRARRDDDRYLFLEALISAREILYLSYIGRDIRKDEELAPSSLLGELIDTVAAMTGTNSRQLAQNWIEQHPLQAFSRRYFQEGGRSDGIFGTRTDYAAALGQTPEPPQPFFDQPVENAEPVAEIGQDEFIRFWRNPVKVWLQQQLAWSEPHIGEAWEPAEPFEPQHADQIAETYIEARREGRDFAQTAARIGAESLLPSGELGRLWQQNFQTAAKQIDTAVLNSPKLPPLSYAIPSDGQILKGSLGNLYRCGQVFYAYGKPNAPQRIAFLLEHLIFCAVMPSEAETRQTFIVQSGETEILAEIAQDRALQLLSEWMAFFNIGQNRPLPFFAKTSLAAAEAFAQKQDWEAALKKAQTAYYGNKVSKGQKDYTEVALVFGNASQNPLEQPLFENLARLLADTLAAAEKREGAGAA

SEQ ID NO: 157142 - DNA, 3369 bp, Escherichia coli O157:H7 EDL933
  CDS (1)..(3369): transl_table=11
atgttaagggtctaccattccaatcgtctggacgtgctggaagcgttgatggagtttattgtcgaacgcgaacggctggacgatcctttcgaaccagagatgattctggtgcaaagtaccggtatggcacagtggctgcaaatgaccctgtcgcaaaagtttggtattgcggcaaacattgattttccgctgcctgcgagctttatctgggatatgttcgtccgggtgttaccggagatccccaaagagagcgcctttaacaaacagagcatgagctggaaactgatgactctgctgccgcaattgctggagcgcgaagactttaccctgttgcggcattatctgactgacgatagcgacaagcgaaagctgttccagctttcctcaaaagcggcggacctgtttgaccagtatctggtctatcgtccggactggctggcacagtgggaaacaggacatttggttgaagggctgggagaggcacaggcctggcaagcgccgttgtggaaggcgctggtggaatatacccatgaactcggacaaccgcgctggcaccgcgccaatctctatcagcgctttatcgaaacgctggagtccgcgacgacctgcccgccggggttaccttcgcgcgtctttatatgcggtatttccgcgttaccgcctgtttatctccaggcgctccaggcgctgggtaaacatattgaaatccatctcctgtttaccaacccctgccgttattactggggcgacattaaagatcctgcttatctggcgaaactactgactcgccagcgccgacacagttttgaagatcacgaattaccgctatttcgcgacagcgaaaatgccgggcagctctttaacagcgatggtgaacaggatgtcggcaacccgctgctggcctcatggggcaagcttgggcgcgactacatttatctcctttctgacctggagagcagccaggagctggacgcctttgtcgatgtgacgccagataacctgctgcataacattcagtctgacattctggaactggaaaaccgcgccgttgctggtgtgaacatcgaagagttttcccgtagcgataacaaacgtccgcttgatccactggatagcagtatcaccttccacgtttgccatagcccgcagcgtgaagttgaagttttacacgatcgcctgctggcgatgctggaagaagacccgacacttactccgcgcgacatcatcgtgatggtggctgatatcgacagctacagtccgtttattcaggctgtgtttggtagcgcacctgcggatcgttacctgccttacgccatttccgaccgtcgggcgcggcagtcgcatcctgtacttgaagcgtttatcagcctgttatcgttgccagacagccgctttgtgtcggaagacgtgctggcattactggatgtgccggtgctggcggcgcggtttgacatcaccgaagaagggctgcgttatttacgtcagtgggtcaacgaatccggcattcgttgggggatagatgacgacaacgttcgcgagctggaactccccgccaccggacaacacacctggcgatttggcctgacgcgtatgttgttgggctacgcgatggagagcgcgcagggcgagtggcaatcggttctaccttatgatgaatcgagcggcttaattgcagaactggtggggcatctggcttcactgctaatgcagctaaacatctggcgtcgcgggctggcacaggagcgtccgctggaagagtggttgccggtttgtcgcgatatgctcaacgccctcttcctgccggatgcggaaaccgaagcggcgatgacgctgatcgaacaacaatggcaggcgattatcgccgaaggtttaggtgcgcagtatggcgatgcggtgccgctgtcactattgcgtgatgaactggcacagcgcctggatcaagaacgtatcagccagcgttttctcgccgggccggttaacatttgtactctgatgccaatgcgttcaattccgttcaaagtggtttgcctgctgggaatgaacgacggcgtttatccacgtcagcttgcgccattgggctttgacctgatgagccagaaaccgaagcgtggcgaccgtagccgtcgcgatgacgaccgctacctgttcctggaagcgttaatttccgcgcagcaaaaactctatatcagctatatcgggcgttccattcaggataacagtgaacgtttcccgtcggtactggtgcaggaactgatcgactacatcgggcaaagtcattatctaccgggcgatgaagcgctcaactgtgatgaaagcgaggcaagggtaaaagcgcatcttacttgcctccatacccggatgccgtttgatccgcaaaactaccagccaggcgaacgacaaagctatgctcgtgaatggctacctgcggccagccaggctggtaaagcacattctgaatttgttcagccgctgccgtttaccttaccggaaaccgtgccgctggaaacgctacaacgattctgggcacatccggtgcgggcgttcttccagatgcgtttgcaggtgaacttccgtactgaagacagcgaaatccccgacaccgagccatttattctggaaggacttagccgttatcaaatcaatcagcagttattgaatgcactggttgagcaggatgatgccgaacgcttgttccgccgcttccgggcggcaggggatttaccgtatggcgcttttggtgaaattttctgggaaacacagtgccaggagatgcagcagcttgccgacagagtcattgcctgtcgccagccggggcagagtatggaaattgatctcgcttgcaacggtgtgcagataactggctggttgccgcaggtgcagccggatggcttgttgcgctggcgtccctctttattaagtgtggcgcagggaatgcaactttggctggaacaccttgtctactgtgccagcggtggtaatggtgaaagtcgcctttttctacgcaaagacggcgagtggcgttttccgccgcttgcagccgaacaggctttgcattacctctcacaactgattgaggggtatcgtgaagggatgtccgcgccattgctggtgttacctgaaagtggcggcgcgtggctaaaaacctgttatgacgcgcaaaacgatgccatgctggatgacgattccacgttgcaaaaagcccgtacgaaattccttcaggcttacgaaggcaacatgatggtgagtggcgaaggtgatgatatctggtatcaaaggctctggcggcaattaacaccagagacaatggaggcaatcgttgaacagtcgcaacgtttcctgttaccgctgtttcgctttaatcagtcatga

SEQ ID NO: 157143 - protein, 1122 aa, Escherichia coli O157:H7 EDL933
MLRVYHSNRLDVLEALMEFIVERERLDDPFEPEMILVQSTGMAQWLQMTLSQKFGIAANIDFPLPASFIWDMFVRVLPEIPKESAFNKQSMSWKLMTLLPQLLEREDFTLLRHYLTDDSDKRKLFQLSSKAADLFDQYLVYRPDWLAQWETGHLVEGLGEAQAWQAPLWKALVEYTHELGQPRWHRANLYQRFIETLESATTCPPGLPSRVFICGISALPPVYLQALQALGKHIEIHLLFTNPCRYYWGDIKDPAYLAKLLTRQRRHSFEDHELPLFRDSENAGQLFNSDGEQDVGNPLLASWGKLGRDYIYLLSDLESSQELDAFVDVTPDNLLHNIQSDILELENRAVAGVNIEEFSRSDNKRPLDPLDSSITFHVCHSPQREVEVLHDRLLAMLEEDPTLTPRDIIVMVADIDSYSPFIQAVFGSAPADRYLPYAISDRRARQSHPVLEAFISLLSLPDSRFVSEDVLALLDVPVLAARFDITEEGLRYLRQWVNESGIRWGIDDDNVRELELPATGQHTWRFGLTRMLLGYAMESAQGEWQSVLPYDESSGLIAELVGHLASLLMQLNIWRRGLAQERPLEEWLPVCRDMLNALFLPDAETEAAMTLIEQQWQAIIAEGLGAQYGDAVPLSLLRDELAQRLDQERISQRFLAGPVNICTLMPMRSIPFKVVCLLGMNDGVYPRQLAPLGFDLMSQKPKRGDRSRRDDDRYLFLEALISAQQKLYISYIGRSIQDNSERFPSVLVQELIDYIGQSHYLPGDEALNCDESEARVKAHLTCLHTRMPFDPQNYQPGERQSYAREWLPAASQAGKAHSEFVQPLPFTLPETVPLETLQRFWAHPVRAFFQMRLQVNFRTEDSEIPDTEPFILEGLSRYQINQQLLNALVEQDDAERLFRRFRAAGDLPYGAFGEIFWETQCQEMQQLADRVIACRQPGQSMEIDLACNGVQITGWLPQVQPDGLLRWRPSLLSVAQGMQLWLEHLVYCASGGNGESRLFLRKDGEWRFPPLAAEQALHYLSQLIEGYREGMSAPLLVLPESGGAWLKTCYDAQNDAMLDDDSTLQKARTKFLQAYEGNMMVSGEGDDIWYQRLWRQLTPETMEAIVEQSQRFLLPLFRFNQS

SEQ ID NO: 157144 - DNA, 3366 bp, Xylella fastidiosa 9a5c
  CDS (1)..(3366): transl_table=11
atgtcccagatgatggtcaccactgactttcgcctataccactccaatgcactcgacgttctggcgggattgctggccgaaacgttgcggtccccggtgccgggccagtcgttgttggtcccagacataatattgattccacaagcggccatgcggcgttggttgcaagccacgttggccaccacgcatggtgtcgtggccaatctggaatttttgactccgggcgagttcgttgcccgtgcattggatgccaatcttggtgccgtgccgaacgctttggatacggccgtgttgcattggcgactatatgcagcgttgtgcgatccagcattactgacgcaaccagcgcttgctgaattacatgcttacctggcggatggcgacctcttcaaaccttggacattggccgaagcactgagtgcggcattcgaaaaataccaggcttggcgttgcgactggttgctacgctgggaggcgggcgcagatccggacgatccacaggccatcctatggcggcatagtgtcaacggtgccacgcaccgcgcacgccgcatccacgactacctgaaccgttatgggtcagggacagaacaccccccccaaggactgccagcgcgactctttattttcgccaccctcaacatctccccagatgtattacgtgtcctggcgacccaggcacaggttggcacactgcacttttacctgccgaccccgaccaaagaatattggggtgatgcgcaacccttcacgcaacgcttgcatcagcccaccgactgcgtcacccagaccggagaaaaccgcctactccatgcctggggtgctgccgggcgtgatttcatgactgtgttggggagctacgaagtcgtccatccctccggcgaaatcaccgcatacgatgatccggaacaacgtctaggcaccaccctggatgaaggcggcctgcgcgatagcctattgcagcgcatgcatgcggatctattccataaccgttcggcacccgtccccgcccccttgcccgcaccacgtctggaagatcccagtctccagtttcacgcctgtcatacccgactgcgtgaactccaggtccttcatgaccggctccgtgccttgctggaacctaactcaccggagggccagcgttttaaccctcccttacaaccgcgtgagattgccgtattggcaccggacatcgacctctacatcccctatctagaagccgtgttcggtggacacgcccatagcgaccccttgccatacacactggctgatgccagcccactgattgatgaaccgctggctgaagtcttcttgcgtctcctcgacttgcccctatcccgctttggcctgcacgaaatattggacctcctggccatcctgccgatggccacccttgctggctttgacacacagaccttagagagcctacggagctggctgaccgccgccggcgcacgctggggattggatgctgcccaccgtgccgaacaccaagccccggctgacgacgcctacacctggagctttgcactggaccgcctcctcctgggtcacgccagcggcgcagatgccgatattgctggcgtcgctgcttggccggatctggaaggcagcatgctgaccgcattggacaccctgatccgattactgcgcgtcctcgccaatacccgacaacgcctgagtgaggccctattaccgacacagtggcgagaacgcttactgagcctgcttgatgcactcctgcctgacatccccaccgcaccatccggtatccagcgtcccttagaacgcttacgcagactgatcgacaccttcgccaccgatgccacacgcgccggagtggccttacccgtgccagccgaagtcgtgcgtatgcactttgccgctttactgggcgacactgatacccgcgccccactgctcacaggtggcatcagtattggccgcatggttcccatgcgactgctccccttccgcgtcatttgtttattaggcatgaacgacggcgacttcccgcgccgcgatcctgcggctggcctcaatcgcctcaccgccgaacttggcaccgcacagcgtcgccctggtgatcgctcccgacgtgatgacgactgcctcctatttctacagctattcagcgccgcccaagacgtcttctacgtcagctaccttggcgctgatcctcacgacggcagcctacgcgaaccctcaccgctgctcacagaactacttagcaccgcagtcacctaccatgccgaccccagtacagccgccaaaacactgctattgcggcattcattacagccattctcccccactgcctttggcgccgacggcgacccacgccgattcagctaccaccccttatggcatgccgccgccgcgagtattgaaggacagcgccaccctctggacccctggtgtccccgccgactcccagcgcttcccgaccccgaacccgccctgccactgcacagcctgcggcgcttctttagcgcccctgcagaacagtttctacaacagcgcctgggcctacgcctgcccgaaccccctcagaccaccgatgaatgcgaccccctctggcttcccagccacggcctggaacgccatcgactcgacaccctgatatttgcctccctactccatgaggctgacgacaccctctacccacaactacgcgcccgtgcattactcccctcaggtcccttaggccgacagcaactccacgaacgcattgaacacctgcgcccctatgcccaagcatttgcacactggcgcggtaccgcccccccgcagtcccagtaccttgaagtgatgatcgacggcattcgtctccacgcacacattcaggacctctacccccacggaatcgcccgcctgcgcctgggtccccctaacggccccgcggtactgcgccacggattagattggctgctggccagcgccgccggccacccctggcccctggtccgctttgaagatgcaggcgttgcgggcctaggtccccatctacagccatccttgcccagttcccaagcacagaccgcactgagcctactcctccgcctgcgcacggctggcctgcgccagcccctaccctttgccccctacagcgcctgggagtactacacccagcgcgacacccccgaacgtgccttgcagaccgcccgcgcccgctggcgtggtaacgaccaccaatggggcgaaagcaaccatgcagcgatccaattagcactgcgtaaccacgatccctttgccaccccgcagaccgctgcccactttgcacagctcgcaacactgatatttgacctactcaccaccggtcaggccgacccagaacccttgacctggctgcaactgcacccatga

SEQ ID NO: 157145 - protein, 1121 aa, Xylella fastidiosa 9a5c
MSQMMVTTDFRLYHSNALDVLAGLLAETLRSPVPGQSLLVPDIILIPQAAMRRWLQATLATTHGVVANLEFLTPGEFVARALDANLGAVPNALDTAVLHWRLYAALCDPALLTQPALAELHAYLADGDLFKPWTLAEALSAAFEKYQAWRCDWLLRWEAGADPDDPQAILWRHSVNGATHRARRIHDYLNRYGSGTEHPPQGLPARLFIFATLNISPDVLRVLATQAQVGTLHFYLPTPTKEYWGDAQPFTQRLHQPTDCVTQTGENRLLHAWGAAGRDFMTVLGSYEVVHPSGEITAYDDPEQRLGTTLDEGGLRDSLLQRMHADLFHNRSAPVPAPLPAPRLEDPSLQFHACHTRLRELQVLHDRLRALLEPNSPEGQRFNPPLQPREIAVLAPDIDLYIPYLEAVFGGHAHSDPLPYTLADASPLIDEPLAEVFLRLLDLPLSRFGLHEILDLLAILPMATLAGFDTQTLESLRSWLTAAGARWGLDAAHRAEHQAPADDAYTWSFALDRLLLGHASGADADIAGVAAWPDLEGSMLTALDTLIRLLRVLANTRQRLSEALLPTQWRERLLSLLDALLPDIPTAPSGIQRPLERLRRLIDTFATDATRAGVALPVPAEVVRMHFAALLGDTDTRAPLLTGGISIGRMVPMRLLPFRVICLLGMNDGDFPRRDPAAGLNRLTAELGTAQRRPGDRSRRDDDCLLFLQLFSAAQDVFYVSYLGADPHDGSLREPSPLLTELLSTAVTYHADPSTAAKTLLLRHSLQPFSPTAFGADGDPRRFSYHPLWHAAAASIEGQRHPLDPWCPRRLPALPDPEPALPLHSLRRFFSAPAEQFLQQRLGLRLPEPPQTTDECDPLWLPSHGLERHRLDTLIFASLLHEADDTLYPQLRARALLPSGPLGRQQLHERIEHLRPYAQAFAHWRGTAPPQSQYLEVMIDGIRLHAHIQDLYPHGIARLRLGPPNGPAVLRHGLDWLLASAAGHPWPLVRFEDAGVAGLGPHLQPSLPSSQAQTALSLLLRLRTAGLRQPLPFAPYSAWEYYTQRDTPERALQTARARWRGNDHQWGESNHAAIQLALRNHDPFATPQTAAHFAQLATLIFDLLTTGQADPEPLTWLQLHP

SEQ ID NO: 157146 - DNA, 3294 bp, Mycobacterium tuberculosis CDC1551
  CDS (1)..(3294): transl_table=11
atggcgcttcacctgcaccgtgccgagcgcaccgatctgcttgccgacgggctcggcgcgctgctggccgatccccagcccgaccctttcgcgcaggaactggtgctggtcgctgcccgcggcgtggaacgctggctgagccaacggctttcgctcgtgttgggctgcgggccgggccgcgccgacggggtgtgcgccggcatcgcgttccgcaatccgcagtccctgatcgccgagatcaccggcaccctcgacgacgacccgtggtcgccggaagccctggcgtggccgctgctggcggtgatcgacgccagcctcgacgaaccgtggtgccgcacgctggcatcccacttggggcacttcgcgacgaccgatgccgaggcggagctgcgccgcggccggcgctattcggtggcgcgccggctagccgggctgttcgcgtcctatgcacgccagcgtcccgggttgctggccgcttggctggacggcgacctcggcgagctgcccggcgacttggcctggcaaccgccactgtggcgcgccctggtgaccacggtcggggccgatcccccgcatgtccgccacgacaagaccatcgcccggctgcgcgacggccccgccgacctgccggctcggctttcgctgttcggccacacccgcctggcctgcaccgacgtgcagctgctggatgcgctggccgtccaccacgacctgcacctgtggctgccgcaccccagcgacgagttgtggcgggcgctggccggcttccagggcgctgatggcctgctgccgcggcggcaggacaccagccggcgggccgcccagcacccgctgctggaaacgctgggccgcgacgtgcgcgaactgcagcgcgcgctgcccgccgcccgggccaccgacgaattccttggtgccacaaccaaacccgacacgttgctgggatggctgcaagccgacatcgccggcaacgcgccgcgacccgccgggcgtagcttgtcggatgccgaccgatcggtgcaggtccatgcctgtcacggcccggcgcggcaaatcgatgtgctgcgcgaggtgctgctcggcctcctcgaggacgacccgacgctgcaaccgcgcgacatcgtggtgatgtgccccgacatcgacacctacgcaccgttgatcgtcgccggcttcggcctcggtgaggtggccggcgactgccaccccgcacaccggctgcgggtgcgtctggccgaccgcgccctgacccagaccaatccgctgctctcggtggccgccgaactgctcaccatcgccgaaacccgggccaccgccagccaactgctcaacctcgcgcaggccgctccggtgcgcgccaaattcgggttcgccgacgacgacctggacaccatcaccacgtgggtgcgcgaatcgaacatccgctggggcttcgacccgacgcaccggcgacgctatggcctcgacaccgtcgtgcacaacacgtggcggttgggactcgaccgcatcctcaccggggtggccatgtccgaggattcccaagcgtggctggataccgcgctgccccttgatgacgtcggcagcaatcgggtcgagctggccgggaggctggccgagttcgtcgaacggttgcatcatgtcgtcggcggactcagcggtgcacggccgttggtcgcatggctggatgcgctggccacggggatcgatctgctgaccgcctgtaacgacggctggcaacgcgcgcaggtgcagcgggagttcgccgacgtgctggcgcgcgccggttcgcgcgcggcgccgctgttgcggctgcccgacgtgcgagcgcttttggacgcgcagctggccgggcgcccgacccgggccaactttcgcaccggcacgctgaccgtctgcacgatggtcccgatgcgctcggtgccgcaccgggtggtgtgcctggtgggtctggacgacggcgtgtttccgcggctgagccatcccgacggggacgacgtgctggcccgagaaccgatgacgggtgaacgtgacatccgttcggaggaccggcaattgctgctggacgcgataggtgcggccacccagaccctggtgatcacttacaccggcgccgacgagcgcaccgggcaaccgcgcccacccgcggtgccgctggccgagttgctcgacgcgctcgaccagacgacgtcagcgccggtgcgtgagcggatcctggtcacacacccactgcagccgttcgaccggaagaacgtcacccccggcgcactgctgggcgccaagccgttcacgttcgaccccgccgcgctcgccgccgcccaggccgccgccgggaagcgctgtccaccaacggctttcatctccggtcggctgcccgcaccacccgcggccgacgtgacgctggcggacctgctcgacttcttcaaggatccggtcaaggggttcttccgggcgctggactacacgctgccctgggacgtcgacaccgtcgaggactcgataccggtccaggtcgacgccttggccgagtggacggtgggcgagcggatgttgcgcgacatgctccgcggcctgcaccccgacgacgccgctcactccgaatggcgtcgcggcacgttgccgcccgggcgcctcggcgtgcgacgggcgaaggaaatccggaaccgcgcgcgcgatctggcggccgccgcgctggcgcaccgcgacggccacggccaggcgcacgacgtcgacgtcgacctcggcgacgggcggcgactgagcggcacggtgacacccgtgttcggcgggcgcacggtgtcggtgacctactcaaagctggcgcccaagcatgtgttgccggcgtggatcggcctggttacgctggccgcccaagagcctggccgcgagtggtcggcgctgtgcatcggccgcagcaagaccaggaaccacatcgccagaaggcttttcgtgccgccgccggacccggtggcggtattgcgggagctggtgttgctgtacgacgccggccggcgcgaaccactgccgctgccgctgaagacgtcctgcgcgtgggcccaggcacgccgagacggccaagacccctacccgcccgcccgcgaatgctggcagaccaacaggttccggccgggcgacgacgacgcgcccgcccacgtgcgagcctggggcccgcgcgcacccttcgaggtgttgctcggcaagccccgcgcgggcgaagaggtcgccggggaagagacccggctaggggcgctggccgcccggctatggctgccgctgttggccgccgaagggtcggtctga

SEQ ID NO: 157147 - protein, 1097 aa, Mycobacterium tuberculosis CDC1551
MALHLHRAERTDLLADGLGALLADPQPDPFAQELVLVAARGVERWLSQRLSLVLGCGPGRADGVCAGIAFRNPQSLIAEITGTLDDDPWSPEALAWPLLAVIDASLDEPWCRTLASHLGHFATTDAEAELRRGRRYSVARRLAGLFASYARQRPGLLAAWLDGDLGELPGDLAWQPPLWRALVTTVGADPPHVRHDKTIARLRDGPADLPARLSLFGHTRLACTDVQLLDALAVHHDLHLWLPHPSDELWRALAGFQGADGLLPRRQDTSRRAAQHPLLETLGRDVRELQRALPAARATDEFLGATTKPDTLLGWLQADIAGNAPRPAGRSLSDADRSVQVHACHGPARQIDVLREVLLGLLEDDPTLQPRDIVVMCPDIDTYAPLIVAGFGLGEVAGDCHPAHRLRVRLADRALTQTNPLLSVAAELLTIAETRATASQLLNLAQAAPVRAKFGFADDDLDTITTWVRESNIRWGFDPTHRRRYGLDTVVHNTWRLGLDRILTGVAMSEDSQAWLDTALPLDDVGSNRVELAGRLAEFVERLHHVVGGLSGARPLVAWLDALATGIDLLTACNDGWQRAQVQREFADVLARAGSRAAPLLRLPDVRALLDAQLAGRPTRANFRTGTLTVCTMVPMRSVPHRVVCLVGLDDGVFPRLSHPDGDDVLAREPMTGERDIRSEDRQLLLDAIGAATQTLVITYTGADERTGQPRPPAVPLAELLDALDQTTSAPVRERILVTHPLQPFDRKNVTPGALLGAKPFTFDPAALAAAQAAAGKRCPPTAFISGRLPAPPAADVTLADLLDFFKDPVKGFFRALDYTLPWDVDTVEDSIPVQVDALAEWTVGERMLRDMLRGLHPDDAAHSEWRRGTLPPGRLGVRRAKEIRNRARDLAAAALAHRDGHGQAHDVDVDLGDGRRLSGTVTPVFGGRTVSVTYSKLAPKHVLPAWIGLVTLAAQEPGREWSALCIGRSKTRNHIARRLFVPPPDPVAVLRELVLLYDAGRREPLPLPLKTSCAWAQARRDGQDPYPPARECWQTNRFRPGDDDAPAHVRAWGPRAPFEVLLGKPRAGEEVAGEETRLGALAARLWLPLLAAEGSV

SEQ ID NO: 157148 - DNA, 3372 bp, Salmonella enterica subsp. enterica serovar Typhi str. CT18
  CDS (1)..(3372): transl_table=11
atgttaagggtctaccactccaatcgtctggatgtgctggaagcgttgatggagttcatcgtcgaacgcgagcggctggatgatccctttgaaccagaaatgattctggtacaaagcacgggtatggcgcagtggctgcagatgaccctttcacaaaagtttggtattgcggcgaatatcgcttttccgttaccggcgagttttatctgggagatgtttgtccgcgtgttgccagatatccccaaagaaagcgctttcagcaaacaaagcatgagctggaaactgatgaccttgctgccgcagttgctggataaggatgagtttgtactgctgcgccattatctgaccgacgacaccgataaacgcaaactctttcagctttccgcgcgcgccgccgacctgttcgatcagtatctggtttatcggcctgactggcttacgcagtgggaggcgggaaaaaccgtggaaggtctgggagaggcgcaaaactggcaggcgccgctgtggaaagcattggtggaatataccgccgcgctggggcagccgcgctggcatcgcgccaatctctaccaacgctttattcaaacgctggaaagcgcgaccgcctgcccgccagggttgccgtcccgcgtttttatttgcggcatttccgcgttaccgccagtgtatctcaaagcattgcaggcgctgggtaaacatattgaaatccatctcctttttactaatccgtgtcggtattactggggggatataaaagacccagcctggctggcaaaactcatggctcgccagcgtcgtcacagttttgaagaccgtcatttaccgttgttccgtgaaaatcagaatccggaagccttatttaacagcgacggtgaacaggatatcggtaatccgctactggcctcatggggaaaactgggacgggattatatctacctgctatctgaactggaaaacagccaggagctggatgcgtttgttgatattacgccagataatcttttgcatcggattcaggcggatatccttgaactggaaagccatgcggtggcgggcgtaaatcttgaggagtattcgcgcagcgacaataagcgtctgctcgatcccgaggataacagcctctcttttcacgtttgtcacagcccgcagcgcgaggtggaaatactgcacgatcgcctgctggcgatgctggaagccgatccgacgctaacgccgcgcgacattatcgttatggtggctgatattgacagctatagcccgtttatccaggcggtatttggtagcgcgccaacggagcgctatctgccttatgctatttccgatcggcgggcgcgtcagtcacatccggtgttacaggcatttatcagtctgctttcgttaccggacagccgcttcgtctccgaggatgttctggcgttgttagacgtaccggtattggctgcccgctttacgatcaacgaagaagggctgcgttatttgcgcttgtgggtcaatgagtcaggcattcgctgggggattgacgatgacaacgtgcgcgagctggaacttcctgccacggggcagcatacatggcaatttggcctgacgcgtatgctgctggggtatgcgatggaaagcgcccagggcgagtggcagtcggttctgccttatgacgaatccagcggtctgattgctgagctggtcgggcatctggcttcgctgctgatgcagcttaatatctggcggcgcggtctggcgcaggagcgacctctggaagagtggttgcccgtttgtcgcgacatgctcaatgatttcttcctgcccgatgcggacacggaagcggcaatgacattgattgaacagcagtggcaggccattatcgccgaaggcgtcgcggcggaatatggcgacgcggtaccgatttcgctactgcgggatgagctggcgcagcgtctggatcaggaacgtattagccagcgcttcctggcgggccccatcaatatttgtacgctgatgccgatgcgttccattccgttcagagtcgtttgcctgctgggaatgaacgacggcgtatacccgcgccagcttgcgccgttgggctttgacctgatgagccaaaaacccatgcgcggggatcgtagccgtcgcgacgatgaccgctacctgtttctggaagcgttaatctcggcgcagcagacgctgtatatcagctacatcggtcgctccatccaggataatagcgaacgctttccctctgtactggtgcaagaattggtggattacatcgggcaaagccactatttgccgggcgacgaaacgctgacctgtgatgagagcgaagcacgagtcaaagcgcatattacgcgtctgcatacccgtatgccttttgatgcgcaaaattaccaacccggcgaacagcaaagttatgccagagagtggttgcccgcggcgagtcagtcgggaaaagcgcattctgactttgtgcagccgcttccttttacgatgccggaaacattgactctggaaagtctgcagcgtttttgggcccatccggtacgcgcattttttcagatgcggcttcaggttaatttccgctcggaagagagtgagattcctgatgctgaaccgtttgaattagagggattgacgcgatatcaacttaaccaacagttgctcaatacgttggttgaagaggacgatgccgaacgcttgttccgccgttttcgggctgcgggagagctgccttacggcgcgtttggcgaaatattctgggatgcgcagtgtcaggagatgcagcaactggcaagccgggttatcgcttgccgtaagccgagccaaagcctggaagtggatctgctttgcaatggagttcagctaaccggctggctaccgcaggtacaggaggatggattattgcgctggcgtcccgctttaatcagcgtggcgcaaggtgtgcaactttggctggaacaccttgtctattgtgccagcggcggtagtggcgaaagtcgcctgtttttgcgcaaagagggagaatggcgatttccgcctcttgataaaacgcaggcaatggcttacctggcgcaactgattgaaggctaccgggaaggcatgtcttctccgctattggtactgccggaaagcggcggcgcatggataaaagcctgttatgacgctgaaaatgatgtcatgttagacgacgatgatactttacagaaggccaggacaaagtttctacaggcttatgaaggcaacatgatggtgagcggcgaaggcgaagatatctggtatcaacgtctttggcgtcagctggaatcggaaacgttgcaggctatcattgcgcagtcacggcattacctgttaccgctgtttcgttttaatcagtctcgttga

SEQ ID NO: 157149 - protein, 1123 aa, Salmonella enterica subsp. enterica serovar Typhi str. CT18
MLRVYHSNRLDVLEALMEFIVERERLDDPFEPEMILVQSTGMAQWLQMTLSQKFGIAANIAFPLPASFIWEMFVRVLPDIPKESAFSKQSMSWKLMTLLPQLLDKDEFVLLRHYLTDDTDKRKLFQLSARAADLFDQYLVYRPDWLTQWEAGKTVEGLGEAQNWQAPLWKALVEYTAALGQPRWHRANLYQRFIQTLESATACPPGLPSRVFICGISALPPVYLKALQALGKHIEIHLLFTNPCRYYWGDIKDPAWLAKLMARQRRHSFEDRHLPLFRENQNPEALFNSDGEQDIGNPLLASWGKLGRDYIYLLSELENSQELDAFVDITPDNLLHRIQADILELESHAVAGVNLEEYSRSDNKRLLDPEDNSLSFHVCHSPQREVEILHDRLLAMLEADPTLTPRDIIVMVADIDSYSPFIQAVFGSAPTERYLPYAISDRRARQSHPVLQAFISLLSLPDSRFVSEDVLALLDVPVLAARFTINEEGLRYLRLWVNESGIRWGIDDDNVRELELPATGQHTWQFGLTRMLLGYAMESAQGEWQSVLPYDESSGLIAELVGHLASLLMQLNIWRRGLAQERPLEEWLPVCRDMLNDFFLPDADTEAAMTLIEQQWQAIIAEGVAAEYGDAVPISLLRDELAQRLDQERISQRFLAGPINICTLMPMRSIPFRVVCLLGMNDGVYPRQLAPLGFDLMSQKPMRGDRSRRDDDRYLFLEALISAQQTLYISYIGRSIQDNSERFPSVLVQELVDYIGQSHYLPGDETLTCDESEARVKAHITRLHTRMPFDAQNYQPGEQQSYAREWLPAASQSGKAHSDFVQPLPFTMPETLTLESLQRFWAHPVRAFFQMRLQVNFRSEESEIPDAEPFELEGLTRYQLNQQLLNTLVEEDDAERLFRRFRAAGELPYGAFGEIFWDAQCQEMQQLASRVIACRKPSQSLEVDLLCNGVQLTGWLPQVQEDGLLRWRPALISVAQGVQLWLEHLVYCASGGSGESRLFLRKEGEWRFPPLDKTQAMAYLAQLIEGYREGMSSPLLVLPESGGAWIKACYDAENDVMLDDDDTLQKARTKFLQAYEGNMMVSGEGEDIWYQRLWRQLESETLQAIIAQSRHYLLPLFRFNQSR

SEQ ID NO: 157150 - DNA, 3372 bp, Salmonella typhimurium LT2
  CDS (1)..(3372): transl_table=11
atgttaagggtctaccactccaatcgtctggatgtgctggaagcgttgatggagttcatcgtcgaacgcgagcggctggatgatccctttgaaccagaaatgattctggtacaaagcacgggtatggcgcagtggctgcagatgaccctttcacaaaagtttggtattgcggcgaatatcgcttttccgttaccggcgagttttatctgggagatgtttgtccgcgtgttgccggatattcccaaagaaagcgctttcagcaaacaaagcatgagctggaaactgatgaccttgctgccgcagttgctggataaggatgagtttgtactgctgcgccattatctgaccgacgacaccgataaacgcaaactctttcagctttccgcgcgcgccgccgacctgttcgatcagtatctggtttatcggcctgactggcttacgcagtgggaagcgggaaaaaccgtggaaggtctgggagaggcgcaaaactggcaggcgccgttgtggaaagcattggtggaatataccgccgcgctggggcagccgcgctggcatcgcgccaatctctaccaacgctttattcaaacgctggaaagcgcgaccgcctgcccgccagggttgccgtcccgcgtttttatttgcggcatttccgcgttaccgccagtgtatctcagagcattgcaggcgctgggtaaacatattgaaatccatctcctttttactaatccgtgtcggtattactggggggatataaaagacccagcctggctggcaaaactcatggctcgccagcgtcgtcacagttttgaagaccgtcatttaccgttgttccgtgaaaaccagaatccggaagccttatttaacagcgacggtgaacaggatatcggtaatccgctactggcctcatggggaaaactggggcgggattatatctacctgctatctgaactggaaaacagccaggaactggatgcgtttgttgatattacgccagataatcttttgcatcggattcaggcggatattcttgaactggaaagccatgcggtggcgggcgtaaatcttgaggagtattcgcgcagcgacaataagcgtctgctcgatcccgaggataacagcctctcttttcacgtttgtcacagcccgcagcgcgaggtggaaatactgcacgatcgcctgctggcgatgctggaagccgatccgacgctaacgccgcgcgacattatcgttatggtggctgatattgacagctatagcccgtttatccaggcggtatttggtagcgcgccaacggagcgctatctgccttatgccatttccgatcggcgggcgcgtcagtcacatccggtgttacaggcatttatcagcctgctttcgttaccggacagccgcttcgtctccgaggatgttctggcgttgttagacgtaccggtattggctgcccgctttacgatcaacgaagaagggctgcgttatttgcgcttgtgggtcaatgagtcaggcattcgctggggaattgacgatgacaacgtacgcgagctggaacttcctgccacggggcagcatacgtggcaatttggcctgacgcgtatgctgctggggtatgcgatggaaagcgcccagggcgagtggcagtcggttctgccttatgacgaatccagcggtctgattgctgagctggtcgggcatctggcttcgctgctgatgcagcttaatatctggcggcgcggtctggcgcaggagcgaccgctggaagagtggctgcccgtttgtcgcgatatgttcaatgatttcttcctgcccgatgcggacacggaagcggcaatgacattgattgaacagcagtggcaggccattatcgccgaaggcgtcgcggcggaatatggcgacgcggtaccgatttcgctactgcgggatgaactggcgcagcgtctggatcaggaacgtattagccagcgcttcctggcgggccccatcaatatttgtacgctgatgccgatgcgttccattccgtttagagtcgtttgcctgctgggaatgaacgacggcgtatacccgcgccacgttgcgccgttgggctttgacctgatgagccaaaaacccatgcgcggggatcgtagccgtcgcgacgatgaccgctacctgtttctggaagcgttaatctcggcgcagcagacgctgtatatcagctacatcggtcgctccatccaggataatagcgaacgctttccctctgtactggtgcaagaattggtggattacatcggacaaagccactatttgccgggcgacgaaacgctgacctgtgatgagagcgaagcacgagtcaaagcgcatattacgcgtctgcatacccgtatgccttttgatgcgcaaaattaccaacccggcgaacagcaaagttatgccagagagtggttgcccgcggcgagtcagtcgggaaaagcgcattctgactttgtgcagccgcttccttttacgatgccggaaacattgactctggaaagtctgcagcgtttttgggcccatccggtacgcgcattttttcagatgcggcttcaggttaatttccgctcggaagagagtgagattcctgatgcggaaccgtttgaattagagggattgacgcgatatcaacttaaccaacagttgctcaatacgctggttgaagaggacgacgccgaacgcttgttccgccgtttccgggctgcgggagagttgccttacggcgcgtttggcgaaatattctgggatgcgcaatgtcaggagatgcagcaactggcaagccgggtcatcgcctgccgtaagccgagccaaagcctggaagtggatctgctttgcaatggcgttcagctaaccggctggctgccgcaggtacaggaggatggattattgcgctggcgtcccgctttaatcagcgtggcgcaaggtgtgcaactttggctggaacaccttgtctattgtgccagcggcggtagtggcgaaagtcgcctgtttttgcgtaaagagggagagtggcgatttccgcctcttgataaaacgcaggcaatggcttacctggcgcaactgattgaaggctaccgggaaggcatgtcttctccgctattggtactgccggaaagcggcggcgcatggataaaagcctgttatgacgctgaaaatgatgtcatgttagacgacgatgatactttacagaaggccaggacaaagtttctacaggcttatgaaggcaacatgatggtgagcggcgaaggcgaagatatctggtatcaacgtctttggcgtcagctggaatctgaaacgttgcaggctatcattgcgcagtcacggcattacctgttaccgctgtttcgttttaatcagtctcgttga

SEQ ID NO: 157151 - protein, 1123 aa, Salmonella typhimurium LT2
MLRVYHSNRLDVLEALMEFIVERERLDDPFEPEMILVQSTGMAQWLQMTLSQKFGIAANIAFPLPASFIWEMFVRVLPDIPKESAFSKQSMSWKLMTLLPQLLDKDEFVLLRHYLTDDTDKRKLFQLSARAADLFDQYLVYRPDWLTQWEAGKTVEGLGEAQNWQAPLWKALVEYTAALGQPRWHRANLYQRFIQTLESATACPPGLPSRVFICGISALPPVYLRALQALGKHIEIHLLFTNPCRYYWGDIKDPAWLAKLMARQRRHSFEDRHLPLFRENQNPEALFNSDGEQDIGNPLLASWGKLGRDYIYLLSELENSQELDAFVDITPDNLLHRIQADILELESHAVAGVNLEEYSRSDNKRLLDPEDNSLSFHVCHSPQREVEILHDRLLAMLEADPTLTPRDIIVMVADIDSYSPFIQAVFGSAPTERYLPYAISDRRARQSHPVLQAFISLLSLPDSRFVSEDVLALLDVPVLAARFTINEEGLRYLRLWVNESGIRWGIDDDNVRELELPATGQHTWQFGLTRMLLGYAMESAQGEWQSVLPYDESSGLIAELVGHLASLLMQLNIWRRGLAQERPLEEWLPVCRDMFNDFFLPDADTEAAMTLIEQQWQAIIAEGVAAEYGDAVPISLLRDELAQRLDQERISQRFLAGPINICTLMPMRSIPFRVVCLLGMNDGVYPRHVAPLGFDLMSQKPMRGDRSRRDDDRYLFLEALISAQQTLYISYIGRSIQDNSERFPSVLVQELVDYIGQSHYLPGDETLTCDESEARVKAHITRLHTRMPFDAQNYQPGEQQSYAREWLPAASQSGKAHSDFVQPLPFTMPETLTLESLQRFWAHPVRAFFQMRLQVNFRSEESEIPDAEPFELEGLTRYQLNQQLLNTLVEEDDAERLFRRFRAAGELPYGAFGEIFWDAQCQEMQQLASRVIACRKPSQSLEVDLLCNGVQLTGWLPQVQEDGLLRWRPALISVAQGVQLWLEHLVYCASGGSGESRLFLRKEGEWRFPPLDKTQAMAYLAQLIEGYREGMSSPLLVLPESGGAWIKACYDAENDVMLDDDDTLQKARTKFLQAYEGNMMVSGEGEDIWYQRLWRQLESETLQAIIAQSRHYLLPLFRFNQSR

SEQ ID NO: 157152 - DNA, 3405 bp, Xanthomonas axonopodis pv. citri str. 306
  CDS (1)..(3405): transl_table=11
atgcacgccacttccgcgcccgatttccgtctttatccatccaatgcgctggataccctggctgccttgctcgcgcaggagttgcgccggccgatgcccgggcagccgttgctgcagccggaggtggtgctgattccacaggtggcgatgcggcgctggttgcagtccacgcttgcggccgagcacggtgttgcggcgaatctggaatttctcacgcccggcgaattcgtcgcgcgcgcgctggagcgcaacctcggcgcggccgacgacgacctggacatggcgaccacgcagtggcgattgtatgcggccctgcaatcggacctgggcagcgatgcggcgttggcgccactggccggctatctgtccgatggcgatgcgctcaagccgtgggcgctggccggcgagctgggcagcgtgttcgaaaaataccaggcatggcgccgcgactggctgctgcgctgggaagcgggcgccgatccggacgacccgcaggcacggttgtggcgcagcatcgccgccggccggcaataccgtgcacggcgcatcggccagtatctggaccgctacacgcgtgccgatggtccgttgccgcaaggcctgccgccgcgcgtgttcgccttcgccatcttgaacatctcgccggacgtcttgcgcgtgctggccacgcaggcgcgcgtgggtacgctgcacttctatctgcccaccccgacgcagggctactggggcgacctgcagaccttgcggcaacgccggcgcgaagacggcgccgtgcaactgttcgccgagcaggtgcaggaaaacccgttgctgcaggcctggggcgcagccgggcgcgacttcatggcgctggtgggcgactacgaagtggtgcacccgctggcggaaattgccgcctacgccgacccgttggactccggccgccgcacgctggccgatggcgggctgggcgacagcctgttgcggcgcatgcagagcgatctgttccatcgccgcgggcctgcagctgacgcgcgattgccggcggtgaatctgcacgaccccagcctgcaggtgcacgcctgccacacgcggctgcgcgagttgcaggtattgcacgaccaactgcgtgcgctgctcgacgatgcacgcttcgacccgcccctgcagccgcgcgagatcgcggtgctgtcgcccaacatcgacccgtacgtgccgtatctggatgcggtgttcggcagccacggcaacgacgacgcgctgccctacgcgctggccgatgccagcccgttggcgagcgaaccgctggccgaagtgttcctcgccttgctcggtttgccgatcgcgcgtttcgggctgcatgaaatcctcgacctgctggccagcgcgccaatcgccgaagcggccggcctggacgaagccgggctggaacgcctgcgcaattggctgcacgcggccggcgcgcgctggggcctggatgcggcgcaccggcgccagcaccaggcaccgggcgacgatgcctacacctggcgtttcgcgctggaccggctgctgctcggccatgccagcggcgccgacgaggacatcgatggggtagcgccgtggccgcagctggaaggcagcgcactggccgcactggacaccttgttgcggctgttgcgcgtgctcgaacggcatcaagccgcgctggccgacgcgatgacaccggtcgagtggcgcgagcgtttgctgggtctgctcgaggcattgatcccggccacgccgactgcgccgcgcgcgcaacgcgcgctggatcgcttgcgcaccttgatcgaccagtttgcccgcgatgcggtgcgcgccgagtacgccggcaaggtgccggccgaggtggtgcgtgcgcatttcgccgcggtgctgggcgactcggatacgcgtgcgccgctgctcaccggcggcatcagtttcgggcgcatggtgccgatgcgcttgctgccgttccgcgtgatctgcctgctcggcatgaacgatggcgacttcccgcgccgcgacccggccgccgggctcaatcgcctcaccgcggaactgggcaccgagcgtcgccggcacggcgaccgttccacgcgcgaggacgaccgcttcctgttcctgcagttgttcgcctccgcgcaagaggtgttttacctcagctatctcggtgccgatgcgcgcgatggcagcgtgcgcgagccgtcggtgctggtcagcgaattgctggcgagcgctgcgcagtaccacgccgccagcaacgcgctcgacacgctggtggtgcggcacccgttgcagccattcgccgccgccgcgttcggtgcgctgggcgacgacggcgccgatccgcgccgtttcagttatcgccggcaatggcggccggcggtggacagcctggtcggccagcggcagccgctggcgccgtgggtggccggtgcattgccggccgaagcgatcgccttgccggccagcatgtccatcgacgcgctgcgccgcttgctgaccgaccctgccgggcagtttctgcgtcatcggttgggcatgcgcctgcccgatccggccggcgaagacagcgatctggaaccgttgctcgcccccacgcgcgggctggatcactacggcttgcagcagcaggtattcgaagctgcattggccggcgacaccgaaggcctatacgagcgcctgcgcgcgcgcgcgctgctgccgtccggcccgctggggcggcgccagctcgacgagcgcgtggcccaattgcgcccgtatgccgacgcattccggcagtggcgtggcgagtccccggcccagtcgcgccggctgcaggtgcagattggcgagatcgaactgcacggccgtgtgccgggctggtacgcaagcggcgtggggcgcgtgcaggtcggcgcgctcagcgggcgcagcgccattcgccacggcttggagtggttgctgctgcgcgccgccggcgaacacgcgccgtacgtgcgtttcttcgaacacgacgacggcctgggcccgcatcccatcgatgcacaaccgctgtcgcaaacgcaggcgcataccgcattggccgagctgctgcagctgtatcgccagggcgtgcagacaccgctggccttcgcgccgtacagcagctggaaatatcaccaggccgcgcgcggcggcgacctggacaaggccatcaaggaggcggccgggcagtggcaatcgggctttggctggagcgaatcgcatagcccggaactgcgcctggtcacccgcggccgcgacccgtttgccgacgcgcaacgcttcgccgcgttcgccaccaccagccatcgtgtgtacgcattgctcgaacaggggaacaccggcgcgccactcgagaccgagcgggtgatcgacagctggcgacactggcacggcgcgcgcgaggatgccgaatga

SEQ ID NO: 157153 - protein, 1134 aa, Xanthomonas axonopodis pv. citri str. 306
MHATSAPDFRLYPSNALDTLAALLAQELRRPMPGQPLLQPEVVLIPQVAMRRWLQSTLAAEHGVAANLEFLTPGEFVARALERNLGAADDDLDMATTQWRLYAALQSDLGSDAALAPLAGYLSDGDALKPWALAGELGSVFEKYQAWRRDWLLRWEAGADPDDPQARLWRSIAAGRQYRARRIGQYLDRYTRADGPLPQGLPPRVFAFAILNISPDVLRVLATQARVGTLHFYLPTPTQGYWGDLQTLRQRRREDGAVQLFAEQVQENPLLQAWGAAGRDFMALVGDYEVVHPLAEIAAYADPLDSGRRTLADGGLGDSLLRRMQSDLFHRRGPAADARLPAVNLHDPSLQVHACHTRLRELQVLHDQLRALLDDARFDPPLQPREIAVLSPNIDPYVPYLDAVFGSHGNDDALPYALADASPLASEPLAEVFLALLGLPIARFGLHEILDLLASAPIAEAAGLDEAGLERLRNWLHAAGARWGLDAAHRRQHQAPGDDAYTWRFALDRLLLGHASGADEDIDGVAPWPQLEGSALAALDTLLRLLRVLERHQAALADAMTPVEWRERLLGLLEALIPATPTAPRAQRALDRLRTLIDQFARDAVRAEYAGKVPAEVVRAHFAAVLGDSDTRAPLLTGGISFGRMVPMRLLPFRVICLLGMNDGDFPRRDPAAGLNRLTAELGTERRRHGDRSTREDDRFLFLQLFASAQEVFYLSYLGADARDGSVREPSVLVSELLASAAQYHAASNALDTLVVRHPLQPFAAAAFGALGDDGADPRRFSYRRQWRPAVDSLVGQRQPLAPWVAGALPAEAIALPASMSIDALRRLLTDPAGQFLRHRLGMRLPDPAGEDSDLEPLLAPTRGLDHYGLQQQVFEAALAGDTEGLYERLRARALLPSGPLGRRQLDERVAQLRPYADAFRQWRGESPAQSRRLQVQIGEIELHGRVPGWYASGVGRVQVGALSGRSAIRHGLEWLLLRAAGEHAPYVRFFEHDDGLGPHPIDAQPLSQTQAHTALAELLQLYRQGVQTPLAFAPYSSWKYHQAARGGDLDKAIKEAAGQWQSGFGWSESHSPELRLVTRGRDPFADAQRFAAFATTSHRVYALLEQGNTGAPLETERVIDSWRHWHGAREDAE

SEQ ID NO: 157154 - DNA, 3198 bp, Chlorobium tepidum TLS
  CDS (1)..(3198): transl_table=11
atgcttgaaatttacaccagcaatcggctcgaaacgctcgtttcggcttttggcaaaatggtggcgtccacgctgcttgcatcgccattcgagcgggagtggatcgtcgtgcagagccggggaatgcagcggtggctttcgatgcggcttgcctcgcagtttggcgtctgggcgggggcggagtacccgtttccgaatgcactgattcagaggcttttcgagtggctggagctatccaagcaggctgacactgagcgattctcgaaggagacgatctcttggagcctgatgcgcttcctgccagatctgctcgaacgcgattcgtttgcgccgcttcgcgcctatctcgatggtgatcgtgacggcctgaagctcttccagctttcgggcaggattgctgatactttcgatcaatacacactgttccgccccgacctgcttgctgcgtgggaggcgggcggcgacgacgcggctcgtgactggcagccggagctgtggcgggcgctcgtggctgaacattcaggaaaacatcgcggccagctccagtcagcgtttctcagaaaggtgaggactacccggctgcctgccgattttccgaaacgcatttcgctcttcggcgtttcctacatgccgccctaccacatcgaaatcctccaggcgctcgccgtgcgaattccggtgaacctgttcctcttgagtccgacccgggagttctggacggacatcgtttctcggcggcggctgttccgcatgagcgagagcgaaagggcactgagcgtggagggcaatccgttgctcgcctcgctcggcaaaagcggacgcgagttcgccgaactgctgctcgacgtcggcaacgtcgaggacgagtatgacctctacgacgaccccggcacagcgacgcttctccgcgcgttgcaatccgacatactcaatctgcgcggcgacggcacggatgggcggcatccgatgcccgacgccagcgactgctcggtgcaggtgcactcgtgccacaatccgctgcgcgaagtcgaggtgctgcacgacaatctgctcgatctgctcgacaagttacccggcctcgaaccgcgcgacatcgtggtgatgacgcccgacatcgagacctacgccccctacattgccacggtattcggtgcgagcggcccggaggagccgcgcctgccgcactccattgccgaccgccggatgctcgacgaaggcggcgtcgccccggcgatactcaaactgctggagctctatggcagccgccacacagcccccgcgcttttcgacctgctctcgtcgccaccggtgagtcgccacttccggcttggcgaggaggagctcgacacggtgcgccgatggatcaaagagacgcgcatccgctgggggatggacgagggtgctcgcagcaagcttggcctgccgccgttccgcgagaactcctggcgggccgggctggagcgactcctgctcggctatgcgatgccggacgaggggcggctgttcaacggcgttttgcccttcgaggtcgcgggcgatgccgaaacactcggcaagctggcagacttcatcgacgcggtcgatcagctctcgacgcgcttcagtcgttcacgcccgctcggcgagtggcggaatcactttttctggatgcttgaaaacttcatcgaggcagacgccgattcggagcgcgaactggcacacgtcaaatcggagattgatagcctcacgtcgctggcggaaaactcgcgattcgaaggcgaggtttcggcgcaggtgatgatcgcctggctgcgcggacggctcgaacagttcgagatggggctcggtttcatgaccggtggcatcaccttctgcgcgatgctgccgatgcgcagcattccgttccgcgtggtggcaatgatcggcatgaatgacggcgcattcccgcgccagcagcgtccgccgggtttcgacctgctcgcccgcgaaccgcgcaagggcgaccgctccgtgcgcggcgatgaccgctaccttttcctcgaatcgctcctctctgcccgcgacgtgttctacctgagctatgtcggccagagtgtacgcgaaaatacgccactgccgccgtcggtactcgtgagtgaactgctcgacgccattgagcgcggcttcgagttcccggagggcgaagatgccgcgtcgcgccttgtcgtccagcaccgcctccagggctttagcccagcctacttcacgaaaggatcatcgctcttcagctactcagcggacaacttcaaagcacttgctggacgcaattcgcttgccgaacgccctttcatcgaggagccgctcaatggttttaccgacgaggatcggacggtcacgctcgacgatcttgcccgctttttcgccaaccctgcggcgtattttctcgaaaggcgtctcggcctgaagccgtcggcggcagtggagccgctcgaagagcgcgagccgttcgaggtggcgggactcgaacgctacgcgatgcgtcaggagttgctcgaagcggtgctcgaaggccacgatggatgcgcgatgctgccgctcttccgctcgcggggattgcttcctccagccacgcacggcgagctgctgttccggaagttgcttgtcgaggtcgaagagttcgccacgaaggttcaggaattgaaaggcggcggcacgttcagccagcttgacatcgatctcgacatcgggggattccgccttactggaaagctcgaccatctgctgccgaccggccaacttctctaccgatgcgcgagaatgcgtgcgcaggatcgcctccgcgcgtggctcctgcaccttgcataccatgccgtcgaaaacggtgcgacacaagaaacgtgcatcatcacgctcgaccgctcgatccgctatcgacccgtcgatgacacgaccaaacggctcgaaacgctgcttgatctctaccgcgaaggaattaccgagccgttgccattctttccccgcacctcgcttgcctgggcggagaaggccgagaaaccagaagccgaccggcgcaaagccgccctcggccagtggctcgacggcttcggcggaatcgaaggcgaggggaacgacccggccatccgccgctgcttcggccaagaaccgcccttcggcgaccgcttcaagagcatcgccgacaaattattgctgccaatgattgagcacgaaggcaaggtatga

SEQ ID NO: 157155 - protein, 1065 aa, Chlorobium tepidum TLS
MLEIYTSNRLETLVSAFGKMVASTLLASPFEREWIVVQSRGMQRWLSMRLASQFGVWAGAEYPFPNALIQRLFEWLELSKQADTERFSKETISWSLMRFLPDLLERDSFAPLRAYLDGDRDGLKLFQLSGRIADTFDQYTLFRPDLLAAWEAGGDDAARDWQPELWRALVAEHSGKHRGQLQSAFLRKVRTTRLPADFPKRISLFGVSYMPPYHIEILQALAVRIPVNLFLLSPTREFWTDIVSRRRLFRMSESERALSVEGNPLLASLGKSGREFAELLLDVGNVEDEYDLYDDPGTATLLRALQSDILNLRGDGTDGRHPMPDASDCSVQVHSCHNPLREVEVLHDNLLDLLDKLPGLEPRDIVVMTPDIETYAPYIATVFGASGPEEPRLPHSIADRRMLDEGGVAPAILKLLELYGSRHTAPALFDLLSSPPVSRHFRLGEEELDTVRRWIKETRIRWGMDEGARSKLGLPPFRENSWRAGLERLLLGYAMPDEGRLFNGVLPFEVAGDAETLGKLADFIDAVDQLSTRFSRSRPLGEWRNHFFWMLENFIEADADSERELAHVKSEIDSLTSLAENSRFEGEVSAQVMIAWLRGRLEQFEMGLGFMTGGITFCAMLPMRSIPFRVVAMIGMNDGAFPRQQRPPGFDLLAREPRKGDRSVRGDDRYLFLESLLSARDVFYLSYVGQSVRENTPLPPSVLVSELLDAIERGFEFPEGEDAASRLVVQHRLQGFSPAYFTKGSSLFSYSADNFKALAGRNSLAERPFIEEPLNGFTDEDRTVTLDDLARFFANPAAYFLERRLGLKPSAAVEPLEEREPFEVAGLERYAMRQELLEAVLEGHDGCAMLPLFRSRGLLPPATHGELLFRKLLVEVEEFATKVQELKGGGTFSQLDIDLDIGGFRLTGKLDHLLPTGQLLYRCARMRAQDRLRAWLLHLAYHAVENGATQETCIITLDRSIRYRPVDDTTKRLETLLDLYREGITEPLPFFPRTSLAWAEKAEKPEADRRKAALGQWLDGFGGIEGEGNDPAIRRCFGQEPPFGDRFKSIADKLLLPMIEHEGKV

SEQ ID NO: 157156 - DNA, 3372 bp, Yersinia pestis KIM
  CDS (1)..(3372): transl_table=11
atgttcacggtttatcattctaatcaactggatttactcaaagcgctcaccactgcgctgatagaaagagaaccgttggataatcctttccagcaagaagtggtgttagtacaaagccccggcatggcccaatggttacaaatgcaactggctcaacagttcagtattgctgccaatatagtgtttcctctacccgctacttttatctgggatatgtttacccgcgttctgcctgatattcctaaagaaagtgcattcagcaaagaggctatgacatggaaacttatgtggctactgccagatttattggagaatccactattttctcccatgaagcgctatttaagtgatgatggggatcggcgtaaaattcaccaactcgcggcacgggtagccgatctttttgaccaatatctggtgtatcgtccggaatggctggaaagttgggaacgtgggcaattgattgaggggcttgatgatgcacagcaatggcaagcattactgtgggttgaactgacccgctatactcgccaattggaacaaccggaatggcaccgggcaaacctctatcagcgttttatccaccaactactcaagtcggacgtttgcccgcaagggttaccgaaacgggtatttatatgtggtatatcggcgttgccacctatctatttacaggccctacaagcattaggtaaacacattgatatccatttgatgtttactaacccctgccgttacttctggggagatattcaggattacactttcctcgctaaattacaaagccgtaaacgtcggcattaccgtgaatcgattgaactaagtctgtttcgccacccgcagcaggcagagcaactatttaataccgatggtgagcagaacctcagtaacccactcttggcctcatgggggcgattagggagggatcacatgtatttgctctctcaaattgatgaaattcaagaggttcatgcttttgtcgatatcgagccagataatcttttgcatggcattcaacacgatatgctggagttggaagatcacgcggttattggcacaaccccagaaaccttagcgcgtagtgatcaaaaacgccgattagatctggatgatcgttcacttagtttccatgtctgccacagcccacaacgagaagttgaggtgctgcaagatcatttacttgggctattagccgcagaccctgaattgaccccgcgcgacatcattgtgatggtggtggatatcgacagttatacaccgtatattcaagctgcgtttggtaatgctccgtctgagcgttatctgccgtttgcgatttctgatcgcaaagccagtcaggctcatcctgcgttgcacgcctttattaccctacttgatttaccccagagtcgctttacggctgaacaagtcttagcactgttggaagtccctgctttggcgaccaaatttggtatcactgaagatggtttacggcgcctgcgacaatgggttggtgagtcaggcatccgttggggattggatgatgataatgtgcgggagctatccttacctgctacgggtcaacacacctggcgttttggtttgacccgcatgctactgggttatgcgatggacagtaccgcaggggattggcaaggtattctgccttacgatgaatccagcgggctggcagcggaactcgccgggcagttggccgatatgctgatgcacctgagtcaatggcggcaacaattaggtcagccccgagaacttagtgaatggttaccaatatgtcgtcaattattggatacgttcttcgatcaagacaatgacactgaggccgctctggtgctgattgaacaacagtggcagaaagtgatcggctacggtattgcagcccaatatccagacgttgtgccacttaatctgctacgagacgaattggcggcacgtttagataatgaacgtattagccaacgttttctcgccgggcctatcaatttctgtaccttaatgccaatgcgctccatcccatttaaagtggtttgtctattgggcatgaatgatggggtatacccgagaacattgcccccccagggatttgatctaatggccaagaaggttcgtcggggtgaccgtagccgccgcgacgatgatcgctatttgttcctagaggctctgctatctgctcagcaacagctttatatcagctacattgggcgttctattcaagacaacagtaagcgttatccttccgtgctggtaagcgagttaattgaatatgtcgcacaaagctatcatttaccgggcgatgaaaaactcagtgctgatgacagtgcacaacgggtgacgcagcacttattatgttggcatgcccgtatgccattctccgctgaaaattttattaaaaatagcgaattacagagctatgccgctgaatggctgccttctgccgagtcgaaggggcatgcacacccaaattttaaccaaccgctacaggctgagccgctggctgaaattacactggatgaattagtgcgtttttaccgccatccagtgagagcatttttccaactgcggctaggggttaattttgttattgaagaaacagaattacctgacgaagagccatttactttggataaccttagccgttatcaatttaatacccagctacttaatgcgctgataaatgaggacgatattaatagcgtctttgccagagccagagctgccggcgtactgccatatggatcttttggtgaactttattgggagagtcaacaagatgagatggtacccttggctgaacaaatccgcagtgaacgtaaagagaatcacagtattgaactcaacattgaattcgctgacatcacggttacgggatggattcatcaggttcaggacgatggtttggtccgttggcggccatcaatattaaccgccgtcgatggccttttattgtggcttgaacatctcgtgtactgttcggcgggtggtgagggagaaagctggatatatggacgaaaagggactgcctggcgttatgcccctatggcggctgatgaagcccggccctatttacaacaactcattaaaggttatcaacaaggtttatgtgagccattgatgctcttgagtaaaagtggatgggcgtggttgagccaatgctttgatcgtgagtcaggccaaattttgtgggacgaagagacgcaaggtaaagcacggatgaaacttttacaggtttggcaaggtgatcagagagtgacaggcgaaggtgaagaccactatatacaaagggtttgcagacgaatggacaaccaacatttggacataattttacatgaaactgaacgttatttgttaccgatagctcgccataataaggcgtga

SEQ ID NO: 157157 - protein, 1123 aa, Yersinia pestis KIM
MFTVYHSNQLDLLKALTTALIEREPLDNPFQQEVVLVQSPGMAQWLQMQLAQQFSIAANIVFPLPATFIWDMFTRVLPDIPKESAFSKEAMTWKLMWLLPDLLENPLFSPMKRYLSDDGDRRKIHQLAARVADLFDQYLVYRPEWLESWERGQLIEGLDDAQQWQALLWVELTRYTRQLEQPEWHRANLYQRFIHQLLKSDVCPQGLPKRVFICGISALPPIYLQALQALGKHIDIHLMFTNPCRYFWGDIQDYTFLAKLQSRKRRHYRESIELSLFRHPQQAEQLFNTDGEQNLSNPLLASWGRLGRDHMYLLSQIDEIQEVHAFVDIEPDNLLHGIQHDMLELEDHAVIGTTPETLARSDQKRRLDLDDRSLSFHVCHSPQREVEVLQDHLLGLLAADPELTPRDIIVMVVDIDSYTPYIQAAFGNAPSERYLPFAISDRKASQAHPALHAFITLLDLPQSRFTAEQVLALLEVPALATKFGITEDGLRRLRQWVGESGIRWGLDDDNVRELSLPATGQHTWRFGLTRMLLGYAMDSTAGDWQGILPYDESSGLAAELAGQLADMLMHLSQWRQQLGQPRELSEWLPICRQLLDTFFDQDNDTEAALVLIEQQWQKVIGYGIAAQYPDVVPLNLLRDELAARLDNERISQRFLAGPINFCTLMPMRSIPFKVVCLLGMNDGVYPRTLPPQGFDLMAKKVRRGDRSRRDDDRYLFLEALLSAQQQLYISYIGRSIQDNSKRYPSVLVSELIEYVAQSYHLPGDEKLSADDSAQRVTQHLLCWHARMPFSAENFIKNSELQSYAAEWLPSAESKGHAHPNFNQPLQAEPLAEITLDELVRFYRHPVRAFFQLRLGVNFVIEETELPDEEPFTLDNLSRYQFNTQLLNALINEDDINSVFARARAAGVLPYGSFGELYWESQQDEMVPLAEQIRSERKENHSIELNIEFADITVTGWIHQVQDDGLVRWRPSILTAVDGLLLWLEHLVYCSAGGEGESWIYGRKGTAWRYAPMAADEARPYLQQLIKGYQQGLCEPLMLLSKSGWAWLSQCFDRESGQILWDEETQGKARMKLLQVWQGDQRVTGEGEDHYIQRVCRRMDNQHLDIILHETERYLLPIARHNKA

SEQ ID NO: 157158 - DNA, 3369 bp, Shigella flexneri 2a str. 301
  CDS (1)..(3369): transl_table=11
atgttaagggtctaccattccaatcgtctggacgtgctggaagcgttgatggagtttattgtcgaacgcgaacggctggacgatcctttcgaaccagagatgattctggtgcaaagtaccggtatggcgcagtggctgcaaatgaccctgtcgcaaaagtttggtattgcggcaaacattgattttccgctgccagcgagctttatctgggatatgttcgtccgggtgttaccggaaatccccaaagagagcgcctttaacaaacagagcatgagctggaaactgatgactctgctgccgcaattgctggagcgcgaagactttaccctgttgcggcattatctgactgacgatagcgacaagcgaaaactgttccagctttcctcaaaagcggcggacctgtttgaccagtatctggtctatcgtccggactggctggcacagtgggaaacaggacatttggttgaagggctgggagaagcacaggcctggcaagccccgttgtggaaggcgctggtggaatatacccatgaactcggacaaccgcgctggcaccgcgcgaatctctatcagcgctttatcgaaacgctggagtccgcgacgacctgcccgccggggttaccttcgcgcgtctttatatgcggtatttccgcgttaccgcctgtttatctccaggcgctccaggcgctgggtaaacatattgaaatccatctcctgtttaccaacccctgccgttattactggggcgatattaaagatcctgcttatctggcgaaactgctgactcgtcagcgtcgacacagttttgaagatcgcgaattgccgctatttcgcgatagcgaaaatgccggacagctctttaacagcgatggtgaacaggatgtcggcaactcgctgctggcctcatgggggaagcttgggcgcgactacatttatctcctttctgacctggagagcagccaggagctggacgcttttgtcgatgtgacgccagataacctgctgcataacattcagtctgacattctggaactggaaaaccgcgccgttgcgggtgtgaacatcgaagagttttcccgtagcgataacaaacgcccgcttgatccactggatagcagtatcacattccacgtttgccatagcccgcagcgtgaagttgaagttttacacgatcgcttgctggcgatgctggaggaagccccgacacttactccgcgcgacatcatcgtgatggtggctgatatcgacagctacagtccgtttattcaggcagtgtttggtagcgcacctgcggatcgttacctgccttacgccatttccgaccgtcgtgcgcggcagtcacatccggtactggaagcgtttatcagcctgttatcactgcctgacagtcgctttgtgtcagaggatgtgctggcgctgctggatgtgccggtgctggcggcgcggtttgacatcaccgaagaagggctgcgttatttacgccagtgggtcaacgaatccggcattcgttgggggatagatgacgacaacgttcgcgagctggaactccccgccaccggacaacacacctggcgatttggcctgacgcgtatgttgctgggctacgcgatggagagcgcgcagggcgagtggcaatcggttctaccttatgatgaatcgagcggcttaattgcagaactggtggggcatctggcttcactgctaatgcagctaaacatctggcgtcgcgggctggcacaggagcgtccgctagaagagtggttgccggtttgtcgcgatatgctcaacgccttcttcctgccggatgcggaaaccgaagcggcgatgacgctgatcgaacaacaatggcaggcgattatcgccgaaggtttaggtgcgcagtatggcgacgcggtgccgctgtcactattgcgtgatgaactggcacagcgtctggatcaagaacgtatcagccagcgttttctcgccggaccggttaacatttgtactctgatgccaatgcgttcaattccgttcaaagtggtttgcctgctgggaatgaacgacggcgtttatccacgtcagcttgcgccattgggctttgacctgatgagccagaaaccgaagcgtggcgaccgtagccgtcgcgatgacgaccgctacctgttcctggaagcgttaatttccgcgcagcaaaaactctatatcagctatatcgggcgttccattcaggataacagtgaacgtttcccgtcggtactggtgcaggaactgatcgactacatcgggcaaagtcattatctaccgggcgatgaagcgctcaactgtgatgaaagcgaggcaagggtaaaagcgcatcttacttgcctccatacccggatgccgtttgatccgcaaaactaccagccaggcgaacgacaaagctatgctcgtgaatggctacctgcggccagccaggctggtaaagcacattctgaatttgttcagccgctgccgtttaccttaccggaaaccgtgccgctggaaacgctacaacgattctgggcacatccggtgcgggcgttcttccagatgcgtttgcaggtgaacttccatactgaagacagcgaaatcccagacaccgagccatttattctggaaggacttagccgttatcaaatcaatcagcagttattgaatgcactggttgagcaggatgatgccgaacgcttgttccgccgcttccgggcggcaggggatttaccgtatggcgcttttggtgaaattttctgggaaacacagtgccaggagatgcagcagcttgccgacagagtcattgcctgtcgccagccggggcagagtatggaaattgatctcgcctgcaacggtgtgcagataactggctggttgccgcaggtgcagccggatggcctgttgcgctggcgtccctctttattaagtgtggcgcagggaatgcaactttggctggaacaccttgtctactgtgccagcggtggtaatggcgaaagtcgcctttttctacgcaaagacggtgagtggcgttttccgccgcttgcagccgaacaggctttgcattacctctcacaactgattgaggggtatcgtgaaggaatgtccgcgccattgctggtgttacctgaaagtggcggcgcgtggctaaaaacctgttatgacgcgcaaaacgatgccatgctggatgacgattccacgttgcaaaaagcccgtacgaaattccttcaggcttacgaaggcaacatgatggtgcgtggcgaaggtgatgatatctggtatcaacggctctggcggcaattaacaccagagacaatggaggccatcgttgaacagtcgcaacgtttcctgttaccgctgtttcgctttaatcagtcatga

SEQ ID NO: 157159 - protein, 1122 aa, Shigella flexneri 2a str. 301
MLRVYHSNRLDVLEALMEFIVERERLDDPFEPEMILVQSTGMAQWLQMTLSQKFGIAANIDFPLPASFIWDMFVRVLPEIPKESAFNKQSMSWKLMTLLPQLLEREDFTLLRHYLTDDSDKRKLFQLSSKAADLFDQYLVYRPDWLAQWETGHLVEGLGEAQAWQAPLWKALVEYTHELGQPRWHRANLYQRFIETLESATTCPPGLPSRVFICGISALPPVYLQALQALGKHIEIHLLFTNPCRYYWGDIKDPAYLAKLLTRQRRHSFEDRELPLFRDSENAGQLFNSDGEQDVGNSLLASWGKLGRDYIYLLSDLESSQELDAFVDVTPDNLLHNIQSDILELENRAVAGVNIEEFSRSDNKRPLDPLDSSITFHVCHSPQREVEVLHDRLLAMLEEAPTLTPRDIIVMVADIDSYSPFIQAVFGSAPADRYLPYAISDRRARQSHPVLEAFISLLSLPDSRFVSEDVLALLDVPVLAARFDITEEGLRYLRQWVNESGIRWGIDDDNVRELELPATGQHTWRFGLTRMLLGYAMESAQGEWQSVLPYDESSGLIAELVGHLASLLMQLNIWRRGLAQERPLEEWLPVCRDMLNAFFLPDAETEAAMTLIEQQWQAIIAEGLGAQYGDAVPLSLLRDELAQRLDQERISQRFLAGPVNICTLMPMRSIPFKVVCLLGMNDGVYPRQLAPLGFDLMSQKPKRGDRSRRDDDRYLFLEALISAQQKLYISYIGRSIQDNSERFPSVLVQELIDYIGQSHYLPGDEALNCDESEARVKAHLTCLHTRMPFDPQNYQPGERQSYAREWLPAASQAGKAHSEFVQPLPFTLPETVPLETLQRFWAHPVRAFFQMRLQVNFHTEDSEIPDTEPFILEGLSRYQINQQLLNALVEQDDAERLFRRFRAAGDLPYGAFGEIFWETQCQEMQQLADRVIACRQPGQSMEIDLACNGVQITGWLPQVQPDGLLRWRPSLLSVAQGMQLWLEHLVYCASGGNGESRLFLRKDGEWRFPPLAAEQALHYLSQLIEGYREGMSAPLLVLPESGGAWLKTCYDAQNDAMLDDDSTLQKARTKFLQAYEGNMMVRGEGDDIWYQRLWRQLTPETMEAIVEQSQRFLLPLFRFNQS

SEQ ID NO: 157160 - DNA, 3813 bp, Shewanella oneidensis MR-1
  CDS (1)..(3813): transl_table=11
atgctgaagttaatccaatccaaccaaatggaagtgctctgtgcccatctcgctgcgtatttgcgccaaccgttgcccggtggctgtttattgcaaagcgagcatattttggtgcaaagccctgggatgtcgacttggttacgccttgagattgcaaaacaaaatggcattgccgccgcgcttgagttccctttgccatccagtttcatttggcaactgtgtcacgatttactgcccaatgtccccaaggaaaacgcctttactaaagcggcaatgacctggaaattaatgcaactactgcctcgcctacttgaggaggaatcctttgggccgctgcggcattatttaggtcatattgagtcaagcagccccgactcgaccacaaaaaataatcaacttgaagcgtcaaactcaatcgccgccgataatattaagctttatcagctctgcggtcgcatcgccgatatcttcgaccaatatttagtttaccgccccgactggattgccgcatgggaagccaatgaaccactcgatgcactcaaattaaatgaggaacaacgctggcaacctattctttggcgggcgctgattgccttcaaccgtgacgaactgcgtcaaagccattaccacagggccaatttacatcaggatttaattgccgcgctggctgatagcacccattccctcgccaaattgcctgagcgtttatttgtgtttggcatttcgtctatggccccacaaaccatagacgtgctccaccagctcgcggcccgaattgatgtcatcatccttaacctcagcccatgccagcattattggggcgatattatcgatcctcggcatcgagcgcgaatggcgctgcaatatgctggcaaacgccaattggccgagcaatgggaagataaactcgaggtcggcaatccgctgcttgccaacaatggcaaaatgggccgtgaattactcgatatgctgctcgaactcccacctgaacactgcgattttggcgacgatgtgtactgcgagccctgcggcgatcctaacgatccggattgcaacgctagcatgctggcgggggtgcaatacgatatcttagaaatgcaaaccctcgatcgcgtactcgggcctgatgccgagctatatcaagcggtgacaaaccgcagacgactaaaacgcgtcgatgattcgattcaaatcaagagctgtcacagcccgctgcgcgaagtcgaaaccttacacgatcatttactcgacctgctggatcgtgacaaccaactcacgcccaaagatattgtggtaatgatgccggatgtcgccgcctacgcgccctatattgatgcggtgtttgccgccaaacaagggctcgaatatatcccctacgccattgccgaccgcggcgcggcgcaggaatcgccactcattaatagctttttgaatttactcaatattaatcagagtcgcttcggactgaccgatattttaagcattctagaagtgccagcgattttacggcgttttcaactcgaagaagacgagctaccactgatccgccgttggttagatgaagccggtgtgcgttgggggcgcgatgagcaaagccgtgttaaacagggtgtgcccgcctttgagcaaaactcctgggcctttggtatcaaacggttaatcttgggctatgccttaaggaacgatgcacccttgtatcaagcaagcccacaggcgccaagctatttagtggtttcaggggtagaaggccaatcggcacaggcccttggcaaactgttgaactttattgaagtcctcgatgaaaccacgctgcaattagcccagcctcaagcgccttgccagcgtttatttgaactgactcaactgttaaatgctttttacgcccccgatgaggatgagcgtgagcagttacaggaagtccgcgacgccattgccaccttagagcaagagttacaggccgccagccctgctgacagctatacagcggcatacgacgttaacccctattttttagaccaaagcggcttacactcaaacgccttgaacttaagcatcgaagtactcgcacaatggtttaatcagcgcttaaccgagtcacgggttggccagcgttatctagcgggcagtgtaaatttttgtaccttaatgccgatgcgctcgattccgtttaaggtggtgtgcctactcggcatgaatgatggcatatatccgcgcatgcaacatcctgtgggctttgatctgatggcacattttggtgctcgcaaaggcgatcgctcccgcagattagacgataggtacttgtttttagaagcactactctcggcacgggaacagctttacatcagctatattggccgcagtgagcgggataactcggagcgcattccctcgatgctagtctccgagctgattgaatattgccagctgtgttatgtgccagaatcgcttacagcagaaactccagccgtgggtaatgaagccgcccaacaggccttgcttgagaccatcataagccaccagccgctacaaccttttgatcctaaactgtatcagtcaacagagccgcaagcgcaggcgataaaacaaagttacagccagcaatggtgcccaccggacatcagcacgcagtcaatccagcgtcgttttattgatgccaacacgcagatcgtgctcgaagatgacacgattggggatagtgatattcaacaaaatattgagccactaagtgaagaagagcatgtcgatatctccgcttttatccgattctttcgtcatcccgcgcaatatttctttaatcgcacattaaaggttgatttaaacctgaatattcaagcggatgataatgatgaacccttcagcctcaatgcgcttgagcgttatctgttacaggcaaggttgctcgatgatgcgctcgagcaaggagctctcgaacaaggcgctcttgaacaaggacaggcgcagcccagtagcgaactattacaacgcttaaaagccagtggtaatttacccatgcagccctttgatgatctgctgctgcgccaatatagccacgatatcgcaccattgattggcagaaccttatttatgcgcggcgatgtagctccgcgccatgcggatattcggctcgcctttgagttacctctatctcacgttgctgcaacgactaaggtgtcggtaaagcgcgtgctccttgaaggtcgcattgatgatatcagtccaaaaggcttggtcagttgtcgccctggcagtgcccatgggcgggatattttagcgctgtatctgcgccatttatgtttaatggccgcaggactgactcagcctagcgatcagcagcccagctatctacaacctagctatctactcgatatggggcattttcacgccctctcgcccattgcgccaaagcaggcccatgatcgactggttcatttgttacaacatttttatcagggacagttgcatccgctgtgttttatgcccaaaacctcccttgcctacgccagtgcagagatcaatgaggatgaaaccagtcaacttgatggtcaatacgatagccaacacagtgtgcggctcgaggcggcgcaaagcgaatggctggacgaacaaggtgaacttggcgaaggcaccgatccccattaccagcggctgtttcggtttccgcaggattttaccgaagcaaattttggcaaactggccgacgagatctatcgacccatgctgagcttgtaccataaagacaccctcgcccaacttgaggagtttgtgctcaatgctgaaccacaaaccgcaacatcagagggagcgcagcaatga

SEQ ID NO: 157161 - protein, 1270 aa, Shewanella oneidensis MR-1
MLKLIQSNQMEVLCAHLAAYLRQPLPGGCLLQSEHILVQSPGMSTWLRLEIAKQNGIAAALEFPLPSSFIWQLCHDLLPNVPKENAFTKAAMTWKLMQLLPRLLEEESFGPLRHYLGHIESSSPDSTTKNNQLEASNSIAADNIKLYQLCGRIADIFDQYLVYRPDWIAAWEANEPLDALKLNEEQRWQPILWRALIAFNRDELRQSHYHRANLHQDLIAALADSTHSLAKLPERLFVFGISSMAPQTIDVLHQLAARIDVIILNLSPCQHYWGDIIDPRHRARMALQYAGKRQLAEQWEDKLEVGNPLLANNGKMGRELLDMLLELPPEHCDFGDDVYCEPCGDPNDPDCNASMLAGVQYDILEMQTLDRVLGPDAELYQAVTNRRRLKRVDDSIQIKSCHSPLREVETLHDHLLDLLDRDNQLTPKDIVVMMPDVAAYAPYIDAVFAAKQGLEYIPYAIADRGAAQESPLINSFLNLLNINQSRFGLTDILSILEVPAILRRFQLEEDELPLIRRWLDEAGVRWGRDEQSRVKQGVPAFEQNSWAFGIKRLILGYALRNDAPLYQASPQAPSYLVVSGVEGQSAQALGKLLNFIEVLDETTLQLAQPQAPCQRLFELTQLLNAFYAPDEDEREQLQEVRDAIATLEQELQAASPADSYTAAYDVNPYFLDQSGLHSNALNLSIEVLAQWFNQRLTESRVGQRYLAGSVNFCTLMPMRSIPFKVVCLLGMNDGIYPRMQHPVGFDLMAHFGARKGDRSRRLDDRYLFLEALLSAREQLYISYIGRSERDNSERIPSMLVSELIEYCQLCYVPESLTAETPAVGNEAAQQALLETIISHQPLQPFDPKLYQSTEPQAQAIKQSYSQQWCPPDISTQSIQRRFIDANTQIVLEDDTIGDSDIQQNIEPLSEEEHVDISAFIRFFRHPAQYFFNRTLKVDLNLNIQADDNDEPFSLNALERYLLQARLLDDALEQGALEQGALEQGQAQPSSELLQRLKASGNLPMQPFDDLLLRQYSHDIAPLIGRTLFMRGDVAPRHADIRLAFELPLSHVAATTKVSVKRVLLEGRIDDISPKGLVSCRPGSAHGRDILALYLRHLCLMAAGLTQPSDQQPSYLQPSYLLDMGHFHALSPIAPKQAHDRLVHLLQHFYQGQLHPLCFMPKTSLAYASAEINEDETSQLDGQYDSQHSVRLEAAQSEWLDEQGELGEGTDPHYQRLFRFPQDFTEANFGKLADEIYRPMLSLYHKDTLAQLEEFVLNAEPQTATSEGAQQ

SEQ ID NO: 157162 - DNA, 3483 bp, Pseudomonas putida KT2440
  CDS (1)..(3483): transl_table=11
atgctcaacaccgcccatctccaccctggcttcatgatcgtccacggcaaccgcctcgacgacctgcgtagcctggtagtgagctggatgcgtcgctacccgctggcgcctctggaaaacgaaattgccctggtgcaaagcaatggcattgcccaatggctcaagctggccctggctgaagatccgctggaagatgaccaaggcggctgcggcatcgccgctgcaatcgatgtgcaactgcccggtagctttatgtggcagctctaccgcagcgtgcttggccgtagcgaaatccccgaagtgtctctgctcgacaaggcacccctgacctggcgcctgatgcgcctgttgccagcgctcatcgagcgcccgcatttcgagccactgcggcgcttcctcaccgatgacagtgacttgcgcaagcgctaccagctcgccgagcgcttggccgacctgttcgaccagtatcaggtctaccgcgccgattggctcaaggactgggccactggtgagcacgtcatcaacacggcccgcggcgagcgcaaagttctgccgccaggcaaccgctggcaagccgagttgtggcgagcattgctggaggatgttggcgagcaaggcatggcgcaaagccgcgccggggtacaccaacgtttcatcgagcgcatcaacagcctggagcaggcgcctgcagggctgccaccgagggtgatcgtgttcggtatctcttcgctgccggcccaggccctggaagcactggcaggcctgtcgcgtttcagtcaggtattgctgtgcgtacacaacccatgccgccaccactgggccgatatcgttgccgacaaggacctgttgcgccaccagtacaaacgccagcaacgcaagcaaggcatgcccctgcaactggacgaccagacgctgcaccagcatgcccacccgttgctggcagcctggggtaaacaaggccgcgactacatcaacctgctcgacagctatgatgacccaggcagctaccagggcgtgttcagcgacggccgcatcgacctgttcagcgacggttcgcccaccacgctgctcaacgaactgcaggacgacatcctggaattgcgcccgctcgccgagagccgcgaacggtggccggcagtcgacaccacaaaagaccgctcgatccgcttccatatcgcgcacagcccgcaacgtgaagtggagatcctccacgaccagctgttggcccgcttcagcgccgacccgactttgcgcccgcgcgacgtgatcgtcatgctgccggacatcgacacttacgcgccgcatatccgcgccgtcttcggccagttgcagcgtaacgatccacgctacatcccgttcaccctgacagaccagggccagcgtggtcgcgagcctttgctgatcgcgcttgagcacctgctcaaactgcctgacagccgcttcgcggtcagcgaagtgctcgacctgctggacgtgccggcagtccgcgcccgcttcggcatccgcgaaaacgacctgcccacgctgcaccgctggatcgagggcgctggcatccgttggggccttgacgccgcgcagcgggcgagcctgggcttgcccgccgggctcgaacagaacagttggcgtttcggcctgcgccgcatgctgttgggttatgccgtgggggtgggtgaggcctgtgatggcattgaaccctacgatgaaatcggtggcctggacgcggcactgatcggcccgctggtcgcgttgctggatgcgctcgaagtcgcctgccaggccttgtccgagcctgccaccgtcagccagtggggcgagcgactgcatgccttgctgcacgtgttcttcctcgccgaggacgagggtgatgagttcctgttgatgcagttgcaggatttgcgtgatagctggcttgaggtgtgcgagaccgtcggcctgcacgacccgctaccgcttaccgtggtgcgtgaagcctggctgtcgggcctcgatcagggcaagctgtcacaacgtttcctcgccggctcggtcaacttctgcacactcatgcccatgcgcgcgatccccttcagagtggtctgcctgctgggcatgaacgatggcgattacccgcgtgcgcagccaccgctggacttcgacctgatggccagcgactatcgccccggcgaccgctcacgccgcgaagacgaccgttacctgttacttgaagcgctactgtcagcacgtgaccaactgtatgtcagctgggtcgggcgcagtatccgcgacaatagcgaacgcccggcctcggtgctgatcggccagttgcgcgatcacatcgctgcgggctggcatttggccgacgcgcagcagggccagcccgcgagaccgggcgagcaactgttgcacgcactgacccaggagcacccgctgcagccgttcagccctcggtacttccagaagggcagcccactgttcagctatgcccatgaatggcaggtgctgcaccagcagggtgagacagacgcgcagagcgagccgggcttgccgccttatcaggacgctgaagccctgagtctgcaccagctgaatgacttcttgcgccacccggtacggcacttcttcagccagcgcttgaaggtgtactttgaggcgctggaagcgccgaccccggacgaagagcccttcgtcctcgataccctgcaacgctacggcgccagtgaaagcctgcttggcgccgccttggccgaaccggacaacgccgaacaagccttgcgcgcccaggcccgacgcctgcaggcctgcggtctgctgccgctagccggtttcggcgaactgctgcaaaacgagttgatcgaaccgctgccggacctgctgcaacgtcaccagcaattgctgcaacgctggccacagctggtcgagggcgctttgccggtgcatttcgagcacggtcagcaccgtctggagggctggctgggccgggtgttccaggcggaagatcagagccttctcagtatcaccacagtacccaacaccatcagtgccgggcgcaacaacctgaagtggcaccgccttatcgcgccctgggttacgcacctggcggcctgtgcggcgggctacccctataacagtgcattggtagccagtgacctgaccctgttgcttgcacccctgccgcaagcgcaggccgcgcaactgctgggcgacctgttggtggcccgtcaggcggcaatgaacgcgccgttgccagtcgcggccaagaccgcgttcgcctggttggcccaggacgatgcggataaagccctggccgcagcagctcgcgcctacgaaggcgacgaacgcaccagctttggcgaacggagtgaaagcattgccttggcccgccagttccgggactttgcagcactcaccgctgacgaaacgtttgaaggctggtgcgaaaccttgtatcgcccgttgtttaccgccccttggcagaccttgggcaacccggagaaaggcgcatga

SEQ ID NO: 157163 - protein, 1160 aa, Pseudomonas putida KT2440
MLNTAHLHPGFMIVHGNRLDDLRSLVVSWMRRYPLAPLENEIALVQSNGIAQWLKLALAEDPLEDDQGGCGIAAAIDVQLPGSFMWQLYRSVLGRSEIPEVSLLDKAPLTWRLMRLLPALIERPHFEPLRRFLTDDSDLRKRYQLAERLADLFDQYQVYRADWLKDWATGEHVINTARGERKVLPPGNRWQAELWRALLEDVGEQGMAQSRAGVHQRFIERINSLEQAPAGLPPRVIVFGISSLPAQALEALAGLSRFSQVLLCVHNPCRHHWADIVADKDLLRHQYKRQQRKQGMPLQLDDQTLHQHAHPLLAAWGKQGRDYINLLDSYDDPGSYQGVFSDGRIDLFSDGSPTTLLNELQDDILELRPLAESRERWPAVDTTKDRSIRFHIAHSPQREVEILHDQLLARFSADPTLRPRDVIVMLPDIDTYAPHIRAVFGQLQRNDPRYIPFTLTDQGQRGREPLLIALEHLLKLPDSRFAVSEVLDLLDVPAVRARFGIRENDLPTLHRWIEGAGIRWGLDAAQRASLGLPAGLEQNSWRFGLRRMLLGYAVGVGEACDGIEPYDEIGGLDAALIGPLVALLDALEVACQALSEPATVSQWGERLHALLHVFFLAEDEGDEFLLMQLQDLRDSWLEVCETVGLHDPLPLTVVREAWLSGLDQGKLSQRFLAGSVNFCTLMPMRAIPFRVVCLLGMNDGDYPRAQPPLDFDLMASDYRPGDRSRREDDRYLLLEALLSARDQLYVSWVGRSIRDNSERPASVLIGQLRDHIAAGWHLADAQQGQPARPGEQLLHALTQEHPLQPFSPRYFQKGSPLFSYAHEWQVLHQQGETDAQSEPGLPPYQDAEALSLHQLNDFLRHPVRHFFSQRLKVYFEALEAPTPDEEPFVLDTLQRYGASESLLGAALAEPDNAEQALRAQARRLQACGLLPLAGFGELLQNELIEPLPDLLQRHQQLLQRWPQLVEGALPVHFEHGQHRLEGWLGRVFQAEDQSLLSITTVPNTISAGRNNLKWHRLIAPWVTHLAACAAGYPYNSALVASDLTLLLAPLPQAQAAQLLGDLLVARQAAMNAPLPVAAKTAFAWLAQDDADKALAAAARAYEGDERTSFGERSESIALARQFRDFAALTADETFEGWCETLYRPLFTAPWQTLGNPEKGA

SEQ ID NO: 157164 - DNA, 3489 bp, Vibrio vulnificus CMCP6
  CDS (1)..(3489): transl_table=11
atgtttactgtctatcactccaatcaagtggatgtgctcaaatctctgttggtggaactgattcgcctcaatcctttgcaaaatcccttcgacaaagagcaaatcttggtgcaaagcccaggcatgtctcaatggttgaaaatggaactggcgaaagagtttggcgtggcagcaaacatcgaatttccgctacccgcgacatttatctgggatatgtttacccacgttttggcggatgtgccaaaacgcagtgcttttaacaaagaagcgatgacgtggaagctgatgcatttgttgccgcagcaacttgcactggcggagttctcgcctttagctcgctatcttcaagacgatgaagaaggtgccaagctttaccaactgtcggaaaaaattgccgatatttttgatggctatttggtgtatcgccctgaatggatacgtgattgggaagcggggaaggccgtggctgagattggtgatgagcatccttggcagcccatgttgtggcaagcactgtatgaccataccgtcgcgcttgggcaatcgccgtaccatcgcgccaacctatacgaacatttcattgatagcttagaaaactacactggccagtttgaacacttgccgcagcgcttgtttgttttcggtatcacctcactgcctccacgttacatggacgcgcttaaaacgctcggtcagcatattgacgtgcatctgatgtttaccaacccgtgtcgatactattggggtgaagtgcgcgatcgcaaatttctggctcgtttggcggcgaaacagcgtcagcacctcgtgtggcaacaagatcattcgcagcttcagggccaaagtgagcaattgaaaggcagtattgaagacaatcttgccgatgaactgcacaccgaggtggtgggcaacagcttgctggcttcgatgggcaaacttggccgtgacaacatgtacttgttgtcacaattggaatcgcatgagattgaagcgtttgtcgatatcgaaccagactcgctattgcatcaactgcaagccgacatcctcaacttggaagagcaccaagatgacgaccatatcgagagcagccatcataaaccgctcatcgaagcgaatgatcgctctttgagcctgcacgtctgccacagcccaatgcgtgaagtggaagtgctgcacgatcaattgctggcgatgttcgatgccgacccaaccctcaaaccgcgcgatattatcgtgatggtggcggacatcaatgcctacagccctgcgattcaagcggtgtttggcaacgcgccgggtgaacgattcatcccctattccatttcagatcgaaccgccgatcaagaaagcccgattctcaacgcgtttttgacgttggtgaatttgccacaaatgcgctgtttggcgtcagagctgttggaactgctagaaacccccgcgattttgcagaaattctccttgagtgaaacggagttcttgcaagcaaaacaatgggtggaagcgtcaggtatccgttgggggctcgatgcgcaaactggatgtgagtttgacctacctcagacaagacaaaatacctggcagtttggtattcaacgcatgttacttggctacgccatgccagaatcggctggcttgttccaaagcggtgaggaatggcttgctccttacaacgaagttcagggaatgggagcggagctggcgggcaaactgagctacttcattgaaaaggtgcgctgctatcgccacgccttagctcaagcgcaaaacattgacgcatggcgacaacaattacacggtgtcttggcggatttcttcgccgtcgacttagaaggcgaagtggcattgaaatcgattcgcgatacgttgggacagttaaaagaacagttgagtgatgcggcatttgaggcggaattgtcaccgagtgtgattcgtcaatatctgctcaataaactgtccggtagtcgtgtaagccagcgttttcttgccggacaagtgaatttttgtaccttgatgccgatgcgttcgattccatttcgcaccgtctgtttattagggatgaacgatggcgtctatccacgcagtgtggcgccggaaggattcgatttaattcatggccgcgccagagccggggatcgctctcgccgcgacgatgaccgctacttgttccttgaagctctgttgtctgcgcagcaaagtgtttacatcagctatgtcggacgttccgtgcaagacaacacagagaaagtgccgtcggtgctggtggctgagttgatggagtattgtcagcaaaactactgtttagcgggggatgagcatctgggtgtggatgaatccggtgcgcatctattaaaggcgatcacctgcgagcatcccatggtgccatttagccccaaagcttttttaggtgaacctccgagcaacgcgaaaagctatgccaaagagtggattccagcggcccagcagcagagcgaaggccaagtgccatcgcagccaagtgcgccattttatcaagcccttgacgattatttactgggtgccacgttcccgcttgaactggatttggttgaactgcaacgtttctggcgactgccggtacagtacttcttcaatcgccgtttgaaagtcgttttcgagccgccaatggccgtgatggcagatgaagagccgtttgtgttggatgggctcaacagcttccaattgcgtgaacagttgttgcatcgtctcttatcggatgaaaactgcacgcctgacatggtacagccgctgattgagggcgtacgcagtgaaatgcgtgcacagggcaagttgccgatcggcgcctttggtgagttggaatttgacaccaaccgcgtgcaagctgaagcattaatagaaaaactaaccggactatctcacgctgctttggatgatctcgaagtggatctgacttttacgccatttggtgaaggcaaaacgattcatttgagcggttggttaacgcagcactatcaatcgggtctattgcgttatcgcagtggcaaaattcgctcacaagattacttagctggttggattgatcacctttcgatgtcggccatgggcgttgccaaagtgacgcatttgattggctacgacaagaaagaaggggttgtgcacctcaaatactcggcgatggcggatgctggccaggccaaatcgttgcttaacgaattgatccgcctgtatatcgaaggcatgactcagcctttggcgtatttccccaaaaccgcattggcggccatcgaagctggcataagccgcgggcaatggaacgatgatgaagagaaagcgttgaaaaaaatggcggataccttcaatgatggtttcttgggtgcaggggaaggcgctgacagttacatcagtcgtatttggccaaaatggaatgaacaactggcccatcaagtacgtttgatgagtagtttggtgctgcaaggggcaagattgtccgttgtggatgcgtcagaggaagcatag

SEQ ID NO: 157165 - protein, 1162 aa, Vibrio vulnificus CMCP6
MFTVYHSNQVDVLKSLLVELIRLNPLQNPFDKEQILVQSPGMSQWLKMELAKEFGVAANIEFPLPATFIWDMFTHVLADVPKRSAFNKEAMTWKLMHLLPQQLALAEFSPLARYLQDDEEGAKLYQLSEKIADIFDGYLVYRPEWIRDWEAGKAVAEIGDEHPWQPMLWQALYDHTVALGQSPYHRANLYEHFIDSLENYTGQFEHLPQRLFVFGITSLPPRYMDALKTLGQHIDVHLMFTNPCRYYWGEVRDRKFLARLAAKQRQHLVWQQDHSQLQGQSEQLKGSIEDNLADELHTEVVGNSLLASMGKLGRDNMYLLSQLESHEIEAFVDIEPDSLLHQLQADILNLEEHQDDDHIESSHHKPLIEANDRSLSLHVCHSPMREVEVLHDQLLAMFDADPTLKPRDIIVMVADINAYSPAIQAVFGNAPGERFIPYSISDRTADQESPILNAFLTLVNLPQMRCLASELLELLETPAILQKFSLSETEFLQAKQWVEASGIRWGLDAQTGCEFDLPQTRQNTWQFGIQRMLLGYAMPESAGLFQSGEEWLAPYNEVQGMGAELAGKLSYFIEKVRCYRHALAQAQNIDAWRQQLHGVLADFFAVDLEGEVALKSIRDTLGQLKEQLSDAAFEAELSPSVIRQYLLNKLSGSRVSQRFLAGQVNFCTLMPMRSIPFRTVCLLGMNDGVYPRSVAPEGFDLIHGRARAGDRSRRDDDRYLFLEALLSAQQSVYISYVGRSVQDNTEKVPSVLVAELMEYCQQNYCLAGDEHLGVDESGAHLLKAITCEHPMVPFSPKAFLGEPPSNAKSYAKEWIPAAQQQSEGQVPSQPSAPFYQALDDYLLGATFPLELDLVELQRFWRLPVQYFFNRRLKVVFEPPMAVMADEEPFVLDGLNSFQLREQLLHRLLSDENCTPDMVQPLIEGVRSEMRAQGKLPIGAFGELEFDTNRVQAEALIEKLTGLSHAALDDLEVDLTFTPFGEGKTIHLSGWLTQHYQSGLLRYRSGKIRSQDYLAGWIDHLSMSAMGVAKVTHLIGYDKKEGVVHLKYSAMADAGQAKSLLNELIRLYIEGMTQPLAYFPKTALAAIEAGISRGQWNDDEEKALKKMADTFNDGFLGAGEGADSYISRIWPKWNEQLAHQVRLMSSLVLQGARLSVVDASEEA

SEQ ID NO: 157166 - DNA, 3366 bp, Xylella fastidiosa Temecula1
  CDS (1)..(3366): transl_table=11
atgtcccagatgatggtcaccactgactttcgcctataccactccaatgcactcgacgttctggcgggattgctggccgaaacgttgcggtccccggtgccgggccagtcgttgttggtcccagacacaatattgattccacaagcggcaatgcggcgttggttgcaagccacgttggccaccacgcatggtgtcgtggccaatctggaatttttgactccgggcgagttcgttgcccgtgcattggatgccaatcttggtgccgtgccgaacgctttggatacggccgtgttgcattggcgactatatgcagcgttgcgcgatccagcattactgacgcaaccagagcttgctgaattacatgcttacctggcagatggcgacctcttcaaaccttggacattggccgaagcactgagtgcagcattcgaaaaataccaggcttggcgttgcgactggttgctacgctgggaggcgggcgcagatccggacgatccacaggccatcctatggcggcatagtgttaacggtgccacgcaccgcgcacgccgcatccacgactacctgaaccgttatgggtcagggacagccccccccccccaaggactgccagcgcgactctttattttcgccaccctcaacatctccccagatgtattacgtgtcctggcgacccaggcacaggttggcacactgcacttttacctgccgaccccgaccaaagaatattggggtgatgcgcaacccttcacgcaacgcttgcatcagcccaccgactgcgtcacccagaccggagaaaaccgcctactccatacctggggtgctgccgggcgtgatttcatgactgtgttggggaactacgaagtcgtccatccctccggcgaaatcaccgcatacgatgatccggaacaacgtccaggcaccaccctggatgaaggcggcctgcgcgatagcctattgcagcgcctgcatgcggatctattccataaccgttcggcacccgtccccgcccccttgcccgcaccgcgtctggaagatcccagtctccagtttcacgcctgtcatacccgactacgtgaactccaggtccttcatgaccggctccgtgccttgctggaacctaactcaccggagggacagcgttttaaccctcccttacaaccgcgtgagattgccgtattggcaccggacatcgacctctacatcccctatctagaagccgtgttcggtggacacgcccatagcgaccccttgccatacacactggctgatgccagcccactgattgatgaaccgttggctgaagtcttcttgcgtctcctcgacttgcccgtatcccgctttggcctgcacgaaatattggacctcctggccagcctgccgatggccacccttgctggctttgacacacagaccttggagatcctgcgaagctggctgaccgccgccggcgcacgttggggattggatgctgcccaccgtgccgaacaccaagccccagctgacgacgcctacacctggagctttgcactggaccgcctcctcctgggtcacgccagcggcgcagatgccgatattgctggcgtcgctgcttggccggatctggaaggcagcatgctgaccgcattagacaccctgatccgattactgcgcgtcctcgccaatacacgacaacgcctgagtgaggccctattaccgacacagtggcgagaacgcctactgagcctgcttgatgcactcctgcctgacatccccaccgtaccatccggtatccagcgtcccttagaacgcttacgcagactgatcgacaccttcgccaccgatgccacacgcgccggagtggccttacccgtgccagccgaagtcgtgcgtatgcactttgccgctttactagccgacaccgatacccgcgccccactgctcacaggtggcatcagtattggccgcatggttcccatgcgactgctccccttccgcgtcatctgtttgttaggcatgaacgacggcgacttcccgcgccgcgatcctgcggctggcctcaatcgcctcaccgccgaacttggcaccgcgcagcgtcgccctggtgatcgctcccgacgtgatgacgactgcctcctacttctacagctattcagcgccgcccaagacgtcttctacgtcagctaccttggcgttgatccacacgacggcagcctacgcgaaccctcaccgctgctcacagaactacttagcaccgcagccacctaccatgccgaccccagtacagcggccaaaacactgctactgcggcattcattacagccattctcccccaccgcctttggcgccgacggcgacccacgccgattcagctaccaccccttatggcaggccgccgccgcgagtattgaaggacagcgccaccctctggccccctggtgtccccgccgactcccagcccttcccgaccccgaaccccccctaccactggatagcctgcggcgcttcttgagcgcccctgcagaacagttcctacaacagcgcctgggcctacgcctgcccgaaccccctcagaccaccgatgaatgcgaccccctctggcttcccagccacggcctagaacgccatcgactcgacaccctgatatttgcctccctactccatgagaatgacgacaccctctacccacaactacgcgcccgcgcattactcccctcaggtcccttaggccaacagcaactccaagaacgcattgaacacctgcgcccctatgcccaagcatttgcacattggcgcggtaccgccctcccacagtcccagtgccttgaagtaatgatcgacggcatccgtctccacgcacacattcaggacctctacccccacggaatcgcccgcctgcgcctgggcccccctaacggccccgcagtactgcgccacggattagattggctgctggccagcgccgccggccacccctggcccctggtccgctttgaagatgcaggcgttgcgggcctaggtccccatctacagccatccttgcccagttcccaagcacagaccgcactgaccctactactccgcctgcgcacggctggcctgcgccagcccctaccctttgccccctacagcgcctgggagtactacacccagcgcgacacccccgaacgtgccttgcagaccgcccgcgcccgttggcgtggtaacgaccaccaatggggcgaaagcaaccatgcagcgatccaattagcactgcgtaaccacgatccctttgccaccccgcagaccgctgcccactttgcacagctcgcaacactgatatttgacctactcaccaccggtcaggccgacccagaacccttgacctggctgcaactgcacccatga

SEQ ID NO: 157167 - protein, 1121 aa, Xylella fastidiosa Temecula1
MSQMMVTTDFRLYHSNALDVLAGLLAETLRSPVPGQSLLVPDTILIPQAAMRRWLQATLATTHGVVANLEFLTPGEFVARALDANLGAVPNALDTAVLHWRLYAALRDPALLTQPELAELHAYLADGDLFKPWTLAEALSAAFEKYQAWRCDWLLRWEAGADPDDPQAILWRHSVNGATHRARRIHDYLNRYGSGTAPPPQGLPARLFIFATLNISPDVLRVLATQAQVGTLHFYLPTPTKEYWGDAQPFTQRLHQPTDCVTQTGENRLLHTWGAAGRDFMTVLGNYEVVHPSGEITAYDDPEQRPGTTLDEGGLRDSLLQRLHADLFHNRSAPVPAPLPAPRLEDPSLQFHACHTRLRELQVLHDRLRALLEPNSPEGQRFNPPLQPREIAVLAPDIDLYIPYLEAVFGGHAHSDPLPYTLADASPLIDEPLAEVFLRLLDLPVSRFGLHEILDLLASLPMATLAGFDTQTLEILRSWLTAAGARWGLDAAHRAEHQAPADDAYTWSFALDRLLLGHASGADADIAGVAAWPDLEGSMLTALDTLIRLLRVLANTRQRLSEALLPTQWRERLLSLLDALLPDIPTVPSGIQRPLERLRRLIDTFATDATRAGVALPVPAEVVRMHFAALLADTDTRAPLLTGGISIGRMVPMRLLPFRVICLLGMNDGDFPRRDPAAGLNRLTAELGTAQRRPGDRSRRDDDCLLLLQLFSAAQDVFYVSYLGVDPHDGSLREPSPLLTELLSTAATYHADPSTAAKTLLLRHSLQPFSPTAFGADGDPRRFSYHPLWQAAAASIEGQRHPLAPWCPRRLPALPDPEPPLPLDSLRRFLSAPAEQFLQQRLGLRLPEPPQTTDECDPLWLPSHGLERHRLDTLIFASLLHENDDTLYPQLRARALLPSGPLGQQQLQERIEHLRPYAQAFAHWRGTALPQSQCLEVMIDGIRLHAHIQDLYPHGIARLRLGPPNGPAVLRHGLDWLLASAAGHPWPLVRFEDAGVAGLGPHLQPSLPSSQAQTALTLLLRLRTAGLRQPLPFAPYSAWEYYTQRDTPERALQTARARWRGNDHQWGESNHAAIQLALRNHDPFATPQTAAHFAQLATLIFDLLTTGQADPEPLTWLQLHP

SEQ ID NO: 157168 - DNA, 3492 bp, Vibrio parahaemolyticus RIMD 2210633
  CDS (1)..(3492): transl_table=11
ttgtttactgtttatcactccaaccaagttgacgttcttaaatcactccttgtcgaactgattcgaatcagtccgctggaaaacccgttcgaaaaagaacaaattctggttcaaagtccgggcatgtcccagtggctaaaaatggaattggccaaagagtttggtgttgccgcgaacattgattttccgcttcctgctaccttcatttgggaaatgtttacgcaggtgttgccagacgtgcccaagcgcagtgcgtttaacaaagaagcgatgacgtggaagttgatgcatctgctgccggggcttctcaaccaagaggtgttttcgccgttagcgcagtacctcaaagatgacagtgaccactctaagctgtatcaactggctgagaaaattgccgatattttcgatggttacttggtgtatcgtccggaatggatcgcaagttgggaagctgggcagagtgtgccagagctggaagatgaacatccgtggcagccgatcttatggcaagcgttgtacgatcacacagtgtcattagggcagtctccatgtcaccgtgccaacctttatgagcactttatcgacacgttagcgagttttaacggcaattttgaccatttacccaagcgtttgtttgtttttggcatttcttcgttgccgcctcgctatatggatgcgctaaaagcaattggcgagcacatcgacgtgcatctgatgttcactaacccttgtcgttattactggggtgaagttcgagatcgcaaatatctggctcgtttggcggcgaaacatcgtcagcacgttgtgtggcaggacgatcactcggaagtgcaaggtgaaactgagcaactgaaaggttcattggaagataatgtgatcgatgagctgcacaccgatgtggtcggaaacagtctgttggcatccatgggtaaactcgggcgcgacaatatgtatctgttgtctcagctggaatctcatgaaattgaagcctttgttgatgttgagcgcgacagtctgctccatcaattgcaagcggatattctcaatcttgaagaacatcaagatgaccaacagattgaaaacagtcatcacaaacaagtggttagcttgggtgataaatcactgagcctacacgcttgtcacagcccgatgcgtgaagtggaagtgctgcatgatcaactattggcgatgttcgatgctgacccaacgttaaaaccgcgcgatattatagtgatggtcgcggacatcaacgcttacagccctgcgattcaggcggtctttggtaacgcaccgggtgagcgttttattccctattcgatttctgaccgaaccgccgatcaagagagcccaattctggccgcatttatgcagttggtgaacttacccaatacgcgctgtttggcatcagaactactcgaacttctggaaactccagcgatattaaagcgttttgaactcagcgaagatgatttcttacaagccaaacaatgggttgaagaatcgggaattcgctgggggttggatgccaataccggacgcgaatttgaactgccggaaacccgtcaaaacacatggcaatttggtattcaacgcatgttgcttggctacgcgatgccagaatccgcaggtttgtttgaaaccgagcaaggcagtttatctccgtacaacgaagtgcaaggcatgggtgcagagcttgcgggcaagttggcacactttatccaacaaattagcacttatcgaagcaaactttctcatgttcagacaattgatggttggcgagagactttggtttcactgctggatgacttcttctcagttgagttagaaggcgaaatggcgctcaaatccattcgcgatacgctcagccaactcaaagagcaattagctgatgccgcatttgatgatgcgttatcgccgtcgatcatcagccaataccttcaaaacaaattatctggcacacgagtcagccagcgcttcctggctggtcaagtgaatttttgtaccctgatgccgatgcgctctattccgtttagaaccgtttgtctactggggatgaatgacggcgtgtacccacgctccatgccgccggaaggctttgacttgatgacgggaagaaccaaaccgggcgaccgttcgcgccgagatgatgaccgttacctattcctcgaagcgatgttgtctgcacagcaaacgctctacatcagttatgttggccgttcaatccaagacaacaccgagcgagtgccttcggttctggtttctgagctgatggaatactgccaccaaaactattgtttaagtggtgatgaagcgttgcccgttgatgagtctggcgacaacttattaaatgcgttggtgaatacccacgccatggtgccgtttagcccaagtgcgttccaaggcacgcacgctagctacgcgaaagagtggattccagcggcattgactcaaagtagtcaatcgcaaggctatgttcgtcgtgattttaatcgggcattagacgactatctgtttggagcgacgttcccacttgagctcgacttagtcgagttgcaacgtttctggcgcttacctgtgcagtattttttcaatcgtcgtttaaaagtaatctttgaaccgccactgccggtgatggaagacgacgaaccctttgttttaggtggtttggaaagctatcaaatgcgtgatgagctgttagaaaccttgcttgaaacgacattgatgcagccagagaaaaaaacagaggtgcttaaacactttatgagtcaacagcgcgcgcaaggcaaactgccggtgggggcgtttggtgatatcgaatttgaaaccaaccgagttcaggcggaagagctggtggacaaactggcgtttttatctggtgcgcctcaagacgatttggaaatcgacctgacgtttgattccttgtttgagcgaaatgaaggcgaagagaaaaacgttcgcctaacaggttggctaacccagtgttaccaatctgggttgattcgttaccgaagcggtaagattcgctcgcaggattaccttgcagcgtggatcgatcaccttgccatgtcggcgtcgggttatgccaagaaaactcatctgattggctacgatcgtaaagaaggcgcgctgcatttgatctacccagaaattgccgatgcgcagtatgccaaacagctactgactgaattagttcgcttattcttcgaaggcatgactaagcctttgccttatttcccgaaaacggcgttggcttgtgttgaagcgggctttagccgtggtcagtgggtcgatgacgaagagaaatccttgaagaaaatggctgacgcattcaatgatggcttcatgagcccgggcgaaggcaataatgcgtacatctctcgaatttggcctgcttggaatgatgagttggcctcagaagttcgtttgctgacagcattagtactgcaaggtgcgcgcttagcggttcaagacgctgatgatgtaaaagcgtga

SEQ ID NO: 157169 - protein, 1163 aa, Vibrio parahaemolyticus RIMD 2210633
MFTVYHSNQVDVLKSLLVELIRISPLENPFEKEQILVQSPGMSQWLKMELAKEFGVAANIDFPLPATFIWEMFTQVLPDVPKRSAFNKEAMTWKLMHLLPGLLNQEVFSPLAQYLKDDSDHSKLYQLAEKIADIFDGYLVYRPEWIASWEAGQSVPELEDEHPWQPILWQALYDHTVSLGQSPCHRANLYEHFIDTLASFNGNFDHLPKRLFVFGISSLPPRYMDALKAIGEHIDVHLMFTNPCRYYWGEVRDRKYLARLAAKHRQHVVWQDDHSEVQGETEQLKGSLEDNVIDELHTDVVGNSLLASMGKLGRDNMYLLSQLESHEIEAFVDVERDSLLHQLQADILNLEEHQDDQQIENSHHKQVVSLGDKSLSLHACHSPMREVEVLHDQLLAMFDADPTLKPRDIIVMVADINAYSPAIQAVFGNAPGERFIPYSISDRTADQESPILAAFMQLVNLPNTRCLASELLELLETPAILKRFELSEDDFLQAKQWVEESGIRWGLDANTGREFELPETRQNTWQFGIQRMLLGYAMPESAGLFETEQGSLSPYNEVQGMGAELAGKLAHFIQQISTYRSKLSHVQTIDGWRETLVSLLDDFFSVELEGEMALKSIRDTLSQLKEQLADAAFDDALSPSIISQYLQNKLSGTRVSQRFLAGQVNFCTLMPMRSIPFRTVCLLGMNDGVYPRSMPPEGFDLMTGRTKPGDRSRRDDDRYLFLEAMLSAQQTLYISYVGRSIQDNTERVPSVLVSELMEYCHQNYCLSGDEALPVDESGDNLLNALVNTHAMVPFSPSAFQGTHASYAKEWIPAALTQSSQSQGYVRRDFNRALDDYLFGATFPLELDLVELQRFWRLPVQYFFNRRLKVIFEPPLPVMEDDEPFVLGGLESYQMRDELLETLLETTLMQPEKKTEVLKHFMSQQRAQGKLPVGAFGDIEFETNRVQAEELVDKLAFLSGAPQDDLEIDLTFDSLFERNEGEEKNVRLTGWLTQCYQSGLIRYRSGKIRSQDYLAAWIDHLAMSASGYAKKTHLIGYDRKEGALHLIYPEIADAQYAKQLLTELVRLFFEGMTKPLPYFPKTALACVEAGFSRGQWVDDEEKSLKKMADAFNDGFMSPGEGNNAYISRIWPAWNDELASEVRLLTALVLQGARLAVQDADDVKA

SEQ ID NO: 157170 - DNA, 3294 bp, Mycobacterium bovis AF2122/97
  CDS (1)..(3294): transl_table=11
atggcgcttcacctgcaccgtgccgagcgcaccgatctgcttgccgacgggctcggcgcgctgctggccgatccccagcccgaccctttcgcgcaggaactggtgctggtcgctgcccgcggcgtggaacgctggctgagccaacggctttcgctcgtgttgggctgcgggccgggccgcgccgacggggtgtgcgccggcatcgcgttccgcaatccgcagtccctgatcgccgagatcaccggcaccctcgacgacgacccgtggtcgccggaagccctggcgtggccgctgctggcggtgatcgacgccagcctcgacgaaccgtggtgccgcacgctggcatcccacttggggcacttcgcgacgaccgatgccgaggcggagctgcgccgcggccggcgctattcggtggcgcgccggctagccgggctgttcgcgtcctatgcacgccagcgtcccgggttgctggccgcttggctggacggcgacctcggcgagctgcccggcgacttggcctggcaaccgccactgtggcgcgccctggtgaccacggtcggggccgatcccccgcatgtccgccacgacaagaccatcgcccggctgcgcgacggccccgccgacctgccggctcggctttcgctgttcggccacacccgcctggcctgcaccgacgtgcagctgctggatgcgctggccgtccaccacgacctgcacctgtggctgccgcaccccagcgacgagttgtggcgggcgctggccggcttccagggcgctgatggcctgctgccgcggcggcaggacaccagccggcgggccgcccagcacccgctgctggaaacgctgggccgcgacgtgcgcgaactgcagcgcgcgctgcccgccgcccgggccaccgacgaattccttggtgccacaaccaaacccgacacgttgctgggatggctgcaagccgacatcgccggcaacgcgccgcgacccgccgagcgtagcttgtcggatgccgaccgatcggtgcaggtccatgcctgtcacggcccggcgcggcaaatcgatgtgctgcgcgaggtgctgctcggcctcctcgaggacgacccgacgctgcaaccgcgcgacatcgtggtgatgtgccccgacatcgacacctacgcaccgttgatcgtcgccggcttcggcctcggtgaggtggccggcgactgccaccccgcacaccggctgcgggtgcgtctggccgaccgcgccctgacccagaccaatccgctgctctcggtggccgccgaactgctcaccatcgccgaaacccgggccaccgccagccaactgctcaacctcgcgcaggccgctccggtgcgcgccaaattcgggttcgccgacgacgacctggacaccatcaccacgtgggtgcgcgaatcgaacatccgctggggcttcgacccgacgcaccggcgacgctatggcctcgacaccgtcgtgcacaacacgtggcggttcggactcgaccgcatcctcaccggggtggccatgtccgaggattcccaagcgtggctggataccgcgctgccccttgatgacgtcggcagcaatcgggtcgagctggccgggaggctggccgagttcgtcgaacggttgcatcatgtcgtcggcggactcagcggtgcacggccgttggtcgcatggctggatgcgctggccacggggatcgatctgctgaccgcctgtaacgacggctggcaacgcgcgcaggtgcagcgggagttcgccgacgtgctggcgcgcgccggttcgcgcgcggcgccgctgttgcggctgcccgacgtgcgagcgcttttggacgcgcagctggccgggcgcccgacccgggccaactttcgcaccggcacgctgaccgtctgcacgatggtcccgatgcgctcggtgccgcaccgggtggtgtgcctggtgggtctggacgacggcgtgtttccgcggctgagccatcccgacggggacgacgtgctggcccgagaaccgatgacgggtgaacgtgacatccgttcggaggaccggcaattgctgctggacgcgataggtgcggccacccagaccctggtgatcacttacaccggcgccgacgagcgcaccgggcaaccgcgcccacccgcggtgccgctggccgagttgctcgacgcgctcgaccagacgacgtcagcgccggtgcgtgagcggatcctggtcacacacccactgcagccgttcgaccggaagaacgtcacccccggcgcactgctgggcgccaagccgttcacgttcgaccccgccgcgctcgccgccgcccaggccgccgccgggaagcgctgtccaccaacggctttcatctccggtcggctgcccgcaccacccgcggccgacgtgacgctggcggacctgctcgacttcttcaaggatccggtcaaggggttcttccgggcgctggactacacgctgccctgggacgtcgacaccgtcgaggactcgataccggtccaggtcgacgccttggccgagtggacggtgggcgagcggatgttgcgcgacatgctccgcggcctgcacctcgacgacgccgctcactccgaatggcgtcgcggcacgttgccgcccgggcgcctcggcgtgcgacgggcgaaggaaatccggaaccgcgcgcgcgatctggcggccgccgcgctggcgcaccgcgacggccacggccaggcgcacgacgtcgacgtcgacctcggcgacgggcggcgactgagcggcacggtgacacccgtgttcggcgggcgcacggtgtcggtgacctactcaaagctggcgcccaagcatgtgttgccggcgtggatcggcctggttacgctggccgcccaagagcctggccgcgagtggtcggcgctgtgcatcggccgcagcaagaccaggaaccacatcgccagaaggcttttcgtgccgccgccggacccggtggcggtattgcgggagctggtgttgctgtacgacgccggccggcgcgaaccactgccgctgccgctgaagacgtcctgcgcgtgggcccaggcacgccgagacggccaagacccctacccgcccgcccgcgaatgctggcagaccaacaggttccggccgggcgacgacgacgcgcccgcccacgtgcgagcctggggcccgcgcgcacccttcgaggtgttgctcggcaagccccgcgcgggcgaagaggtcgccggggaagagacccggctaggggcgctggccgcccggctatggctgccgctgttggccgccgaagggtcggtctga

SEQ ID NO: 157171 - protein, 1097 aa, Mycobacterium bovis AF2122/97
MALHLHRAERTDLLADGLGALLADPQPDPFAQELVLVAARGVERWLSQRLSLVLGCGPGRADGVCAGIAFRNPQSLIAEITGTLDDDPWSPEALAWPLLAVIDASLDEPWCRTLASHLGHFATTDAEAELRRGRRYSVARRLAGLFASYARQRPGLLAAWLDGDLGELPGDLAWQPPLWRALVTTVGADPPHVRHDKTIARLRDGPADLPARLSLFGHTRLACTDVQLLDALAVHHDLHLWLPHPSDELWRALAGFQGADGLLPRRQDTSRRAAQHPLLETLGRDVRELQRALPAARATDEFLGATTKPDTLLGWLQADIAGNAPRPAERSLSDADRSVQVHACHGPARQIDVLREVLLGLLEDDPTLQPRDIVVMCPDIDTYAPLIVAGFGLGEVAGDCHPAHRLRVRLADRALTQTNPLLSVAAELLTIAETRATASQLLNLAQAAPVRAKFGFADDDLDTITTWVRESNIRWGFDPTHRRRYGLDTVVHNTWRFGLDRILTGVAMSEDSQAWLDTALPLDDVGSNRVELAGRLAEFVERLHHVVGGLSGARPLVAWLDALATGIDLLTACNDGWQRAQVQREFADVLARAGSRAAPLLRLPDVRALLDAQLAGRPTRANFRTGTLTVCTMVPMRSVPHRVVCLVGLDDGVFPRLSHPDGDDVLAREPMTGERDIRSEDRQLLLDAIGAATQTLVITYTGADERTGQPRPPAVPLAELLDALDQTTSAPVRERILVTHPLQPFDRKNVTPGALLGAKPFTFDPAALAAAQAAAGKRCPPTAFISGRLPAPPAADVTLADLLDFFKDPVKGFFRALDYTLPWDVDTVEDSIPVQVDALAEWTVGERMLRDMLRGLHLDDAAHSEWRRGTLPPGRLGVRRAKEIRNRARDLAAAALAHRDGHGQAHDVDVDLGDGRRLSGTVTPVFGGRTVSVTYSKLAPKHVLPAWIGLVTLAAQEPGREWSALCIGRSKTRNHIARRLFVPPPDPVAVLRELVLLYDAGRREPLPLPLKTSCAWAQARRDGQDPYPPARECWQTNRFRPGDDDAPAHVRAWGPRAPFEVLLGKPRAGEEVAGEETRLGALAARLWLPLLAAEGSV

SEQ ID NO: 157172 - DNA, 3252 bp, Wigglesworthia glossinidia endosymbiont of Glossina brevipalpis
  CDS (1)..(3252): transl_table=11
atgatttatatatatcaatctaatcaaattgatcttatacaaaaaatattatcaaaaatattaaagaatttccctataaataaccctatgaaaaaagaaataataattactagtagttcaaatatttctgaatggttaaaattaaatattactttaaatataaatattttagctaatgtagaatttatatctcttaatagttttatttggaaattagttatattaacaacaaaaaatgttccatttgataattttgcatttagattaatgctttcttggtatattgctcaaataattccaaaaataaataaaaatattaaaataaaaaacgtttataaaaatttaaatcaatttcaaatattttatttatcatataaattatctgaattatataataaatatttaatattcaaacctgattggattgatttattaaattttaaaaaaaaatctaaaaaattagaggattctcaatattttcaactaattatatggaatttattagtaaaaaaaataaaaaaagaaaaagatttttgtatttctagcatatatgaatcgtgtatacaaaaaatagaaaaatcaaatcttatttttgaagatattgctgatagaatttttatatttggaatatattatattcctgaaatttatttaaaaattttaaaaacattgagtaaaaaaatcgatatacatttattttgtataaatccatgttgtttatattggtttgatattgataatagattttatatctcaaatctaatcgaaaataaaattaaaaataaaaaaaatttttttagaaaaaaaataaaaatttctttattatcattttggggttgtctgggggcaaaatatttaaaattattaaataatttaaatgaaaacatagaaaataaaattttttataaaccaaaaaaagataatttgctgcatactattcaaaatgatattttatataataaatattataatataattatatcaaaaaagtttaataaatttgaaaaaaaaaatttacgcgttttaaattcaaaagataattctatcacaattcatacttgtaaaaataaatatgaagaaataaattctctttataacttcatagtaaaaattactaaagataataaaaaaatttgttttaaagatattttagtaatggcgtcaaatatagaagactattcttcatacattaactctatttttaataatattaattacaaaataaattattttatttcagatattaaaatatatgaaagattcaatattatttctgctatatttaacatattaaagttaccaaaatttaaattttctatagaacaaattttttatctattagaattttcatctatttctaataagtttaaaatgaaagaagatgaaattaagatgttaaaatatttagttattaatttaggagttcaatggggtataagtaataaaagatttaaaaaatgtaatgctaattttgaagaaaaatactcttggaataatataataaaaaaaacggtatcagaatattatacaagaataaacaataaagtttactttaaatatatatactctaatgatttagatgaaaaaaagattaattctctaataaaattagaaaattttatttctaaattgaattattggtatgactatttatctcaacctcatttattatacgaatggaatgatgttataaaaaaaataataaaaaatttttttgatccagataaaaaagaaaattatgttttagatttattaaaaaaaaattggaatgatattatttttcaaggaataaacacgaaatacaaaaaaacgatttatattgaaacattagaaaatatcttgtataaaagatttaagaaagaaaatttttttaaaaaaaataagtttaattcaatacatttttgtaatttaaaattatcaaaaataataccaagcaaaattatttgtttgttaggaattaatgatggaacttatcctaggcaagacataaattacaattttgattcaatttataaaaatttaaaaaacgatgataaaaatataagacaagaagatttatattctttcttaattattttgttatcttcaaaagaacatctttatataagttttattaaaaattatattaatgaagaaagatcaaaatatatttctataataataaatgaattaatagaatatatttctgtaagtttttatatcaaaaattgcaaatcatataattttttagaaaatattaataatataaaaaaaattttatttaaaaaatataataacttttatttttttagaaaagaaaaaatagaaatttttaataaaaaatattttttaaataacataaatataaattcagataaaaaaattttttctaagatatcaataaacgaattttttttattttattctaatcctattaaattttggtgtaaaaaaaaattaaaaattaatttcagtaaagaacatctttataaagataatgaatttattttaaaaaataaatttaatagctatagaataaatataatattatttgaatatttaattaaaaataaatatttaaataaaaaagatttattaaaaaatacaattaaatatttttttgatggggtttttgaagaaattattatagaaaaaaaatattatcaaataataaaattaataaataatataaataaacatttattaatgaaaaaagaaacaaaaaaagttttttttaaattagatcgtacaataatatttgggtggttgcctaatttacaaaattccggattattaagatggaatcctaaaaatttatctttgcaagatggatttctgttttggatagaacatttgatttattgtatcataggaggaaaaggagatagcatttttttagggatagaatcatattggcattttaagaatataaattacaaaaaagcaaaacacttttttaaaaaactcttggttgggtatgaattaggaattgaaaatccgatttttcttctaaataaatccggaggagcatggataaatcattcttttaataaagaaaaaaataagttaattttagatgaaaaaactaaaaaaaatgcccgttctaaattaatttctgcttggcaaggaaataagttcataaatggagattctcaagacttttatatatctaaagttataccatttctaacagaaaataatattaataaaattataaatgaatcaaaaaaatattttatttttccattaaaattcaataaattattaaaataa

SEQ ID NO: 157173 - protein, 1083 aa, Wigglesworthia glossinidia endosymbiont of Glossina brevipalpis
MIYIYQSNQIDLIQKILSKILKNFPINNPMKKEIIITSSSNISEWLKLNITLNINILANVEFISLNSFIWKLVILTTKNVPFDNFAFRLMLSWYIAQIIPKINKNIKIKNVYKNLNQFQIFYLSYKLSELYNKYLIFKPDWIDLLNFKKKSKKLEDSQYFQLIIWNLLVKKIKKEKDFCISSIYESCIQKIEKSNLIFEDIADRIFIFGIYYIPEIYLKILKTLSKKIDIHLFCINPCCLYWFDIDNRFYISNLIENKIKNKKNFFRKKIKISLLSFWGCLGAKYLKLLNNLNENIENKIFYKPKKDNLLHTIQNDILYNKYYNIIISKKFNKFEKKNLRVLNSKDNSITIHTCKNKYEEINSLYNFIVKITKDNKKICFKDILVMASNIEDYSSYINSIFNNINYKINYFISDIKIYERFNIISAIFNILKLPKFKFSIEQIFYLLEFSSISNKFKMKEDEIKMLKYLVINLGVQWGISNKRFKKCNANFEEKYSWNNIIKKTVSEYYTRINNKVYFKYIYSNDLDEKKINSLIKLENFISKLNYWYDYLSQPHLLYEWNDVIKKIIKNFFDPDKKENYVLDLLKKNWNDIIFQGINTKYKKTIYIETLENILYKRFKKENFFKKNKFNSIHFCNLKLSKIIPSKIICLLGINDGTYPRQDINYNFDSIYKNLKNDDKNIRQEDLYSFLIILLSSKEHLYISFIKNYINEERSKYISIIINELIEYISVSFYIKNCKSYNFLENINNIKKILFKKYNNFYFFRKEKIEIFNKKYFLNNININSDKKIFSKISINEFFLFYSNPIKFWCKKKLKINFSKEHLYKDNEFILKNKFNSYRINIILFEYLIKNKYLNKKDLLKNTIKYFFDGVFEEIIIEKKYYQIIKLINNINKHLLMKKETKKVFFKLDRTIIFGWLPNLQNSGLLRWNPKNLSLQDGFLFWIEHLIYCIIGGKGDSIFLGIESYWHFKNINYKKAKHFFKKLLVGYELGIENPIFLLNKSGGAWINHSFNKEKNKLILDEKTKKNARSKLISAWQGNKFINGDSQDFYISKVIPFLTENNINKIINESKKYFIFPLKFNKLLK

SEQ ID NO: 157174 - DNA, 3342 bp, Haemophilus ducreyi 35000HP
  CDS (1)..(3342): transl_table=11
atgtttacggtctatttttctcagaagctatcatcactcgctaaattatttattcaattacagcaaagcaatcctaatcctaatccatttgaagcagaaattgttttagtgcaaagtgtaggaatggcacaatggttacaaatgcaaattgccaatcaaatagggatcgcaggtaactatgaattcccttttcctacgagttttttatggcaacaatatcgtgtcctctttcctgaacttcctactgaaaatatttttgaacgtgaaacggttacttggcgtttaatacgtttaattccagattatttatctttacctgaatttcaatctttacagcactatttaactaaagattcgcgtcaataccaattaaagctttatcaattagctaaaaaagtagcggatttatttgatcagtatttagtttatcgtccacattggttggttcattgggaaaatgatcggcttgagattgttcgagatgaaattctgaaccatgcaaatttaaaagtgaaaaatagcgaagatatttggcaaaatttaagttggcaggctattttatggcgcgcattaattaatgatattaaattagattgtgatgaatcggtgtttgtgacttcacatcgtgcttatttgcaagaacagtattttaataaattagataatttaacagaaatagaaaaatcaaaattacctaagcgggtctttatttttggtatttcctctttgcccgcgacgcaattagctgttttaaaaaagctcagtgaacattgtcaaattcatctcttctttttgaatccaagtgcagaatattggggagataatgttgaagatcgggtattagagaaattagcacttaagcagaaaatgaccgctaaagaattagaagcgttatttgtacagaaaaataatcagttattatcaatgtggggtaagcaagggcgtgattttttagcacaaattcttgagcaagaacccgaccaaattcttgatgtttttgatgcttgtgaaggcgattcaaatctgattaagttaaagaacgccattctttcttttgataatcctcaacaattattgcttgcttcgcaagatgattcagtacagtttcactcttgccatagcattatgcgagaagtggaagtattgcataaccgtttattgcaaatgtttgctcaagatccaacattggctgcaaaagatattattgtcatgtcagccgatattaaccaatatgcgccttatattgaagcggtcttttcgcgttatatgaaagaagataaacgctatatcccattcgcttttgctgatcagaaggccataacggttgatccaattctgatgagttttatgagtctgcttaacttaaaggaaagcttgtttgatgcggaatcattgcttgatttattagatgtgaatgcaattagagaacgttttcagtttcagttacaagatattcatattgtacggcattgggttaatcaagcaggaattcgttttggtttaacgatcgatcaatcagaatggcaaaattataatgcgtggcaaaatggtttaactcgtttattgatgggcattagcctaagagaagaaaatggcatttggcaggatagtgtagcttttaatgaaagttatggtttatcggcagagcttgttggttatttagcaaactttattgaaaaattgagtgcttggcatcaaattattcaacaaaaacagcctattgaagtatggcaaaaacaactttcattattgattaatgatttttatcaagaaaatgaagaaagcgttcacgcaattaatttattaaatatcgccttagcagaaattatccaaaaaataacagatgcgaaatttgaacagcaaattgatattgaaattattagtttattgtttaatgaaaaattgaatagccaacaaaataacttaaatttcctggtcggtaaggtaaatttttgcactttattacctatgcgcgccattccatttaaagttgtttgcttattaggtatgaatgaaagcgattttccgcgtgcacagacggtgaatagttttgatttaatgcagtatgcctctaaaaaaggcgatcgggctcggcgtgatgatgatcgttatttatttttagaagcactattatcagcacaacaatttttctatattagttatattggacaatctaatattaataataagcaacatttaccatcggtgatggtttcgcagttactagattatttcgctgaatatcttgcgcctcaatctttagcattagtcagcccacaaggtaaattttctgaacagcacttttttgcagaaatggtgcaacaacatccattaacagtatttagcttaaacaactttagcgaaacaaattatgcctatgatcgagaatggctcaccatgacccaaacggaaaaaatgcaagagttttgcccgggtgaatttaattcaaacgctgaattgcctactgaaattcagctcgaacagttaattaagtttgtggtcaatccggtgcagtatttctttaatcagcatttaggtatttattttagggataataataaacagattgaagaaagtgaaaaatttgtattgaatgcattagatcgttataaactacgtgataaattggtttgcttagatgatgatttaattcagcaaatgtttgaacaggaaaagctgaaaggtaatttacccgcggcgaattttgctcaactagcacaacaaaaaattgtagcatcggttaacattataaaagacgaattagtgggttatttaaccgaaagtgagattttagaagttgatcagacctttttaattaatggaatcgaattacgtgttgtaggtaatatttgccataggtttggtgatgaaattgttttttggaaagtcagtggtttaaaagataaagattatattcgttattggctttattatttgtttcttcgaatacaatcacaaccgttgaaattaaagattatctatttagatgaaaataaaaagaaagtattccaatttaatgaaattagccaagatgatgcagaaaagcaattacgcatttatttaaccgattatttatccagtttttcttgtttaaaatgggctatgtttgaaggtttagatgattattttaaaaatcttaataaggctgaaaatattgagcactactgtcaggaaaacttagaaaagttaatcggaaaagaattttttaatagtcgctatttaaaacgtattttaaatcaaagcgtaatgttagattatggtagtattcacagtactacattacaatggtttgagttaatgcaaactagtaaaaaaagccctcatagtaaggaaaatgaatga

SEQ ID NO: 157175 - protein, 1113 aa, Haemophilus ducreyi 35000HP
MFTVYFSQKLSSLAKLFIQLQQSNPNPNPFEAEIVLVQSVGMAQWLQMQIANQIGIAGNYEFPFPTSFLWQQYRVLFPELPTENIFERETVTWRLIRLIPDYLSLPEFQSLQHYLTKDSRQYQLKLYQLAKKVADLFDQYLVYRPHWLVHWENDRLEIVRDEILNHANLKVKNSEDIWQNLSWQAILWRALINDIKLDCDESVFVTSHRAYLQEQYFNKLDNLTEIEKSKLPKRVFIFGISSLPATQLAVLKKLSEHCQIHLFFLNPSAEYWGDNVEDRVLEKLALKQKMTAKELEALFVQKNNQLLSMWGKQGRDFLAQILEQEPDQILDVFDACEGDSNLIKLKNAILSFDNPQQLLLASQDDSVQFHSCHSIMREVEVLHNRLLQMFAQDPTLAAKDIIVMSADINQYAPYIEAVFSRYMKEDKRYIPFAFADQKAITVDPILMSFMSLLNLKESLFDAESLLDLLDVNAIRERFQFQLQDIHIVRHWVNQAGIRFGLTIDQSEWQNYNAWQNGLTRLLMGISLREENGIWQDSVAFNESYGLSAELVGYLANFIEKLSAWHQIIQQKQPIEVWQKQLSLLINDFYQENEESVHAINLLNIALAEIIQKITDAKFEQQIDIEIISLLFNEKLNSQQNNLNFLVGKVNFCTLLPMRAIPFKVVCLLGMNESDFPRAQTVNSFDLMQYASKKGDRARRDDDRYLFLEALLSAQQFFYISYIGQSNINNKQHLPSVMVSQLLDYFAEYLAPQSLALVSPQGKFSEQHFFAEMVQQHPLTVFSLNNFSETNYAYDREWLTMTQTEKMQEFCPGEFNSNAELPTEIQLEQLIKFVVNPVQYFFNQHLGIYFRDNNKQIEESEKFVLNALDRYKLRDKLVCLDDDLIQQMFEQEKLKGNLPAANFAQLAQQKIVASVNIIKDELVGYLTESEILEVDQTFLINGIELRVVGNICHRFGDEIVFWKVSGLKDKDYIRYWLYYLFLRIQSQPLKLKIIYLDENKKKVFQFNEISQDDAEKQLRIYLTDYLSSFSCLKWAMFEGLDDYFKNLNKAENIEHYCQENLEKLIGKEFFNSRYLKRILNQSVMLDYGSIHSTTLQWFELMQTSKKSPHSKENE

SEQ ID NO: 157176 - DNA, 3312 bp, Prochlorococcus marinus subsp. marinus str. CCMP1375
  CDS (1)..(3312): transl_table=11
ttgttaactgtctaccgaagtaacagagctgaatggttagcagaagtgctggcagctcaattacgtctaaacaagccaaagccatttcaatcagtagaaataatggttaacacatggccaacaagcagatggttatccgaacaaattgccacattcaatggcatcagtgcgttaattgagtttcctttccctaattctcatttacgaaagtttgttcaacttttcttaggtttagaagttacatcaaaggacccatggaacaccaatcaattgacttgggaaattattgacgtactgccaaaactacttaaggaagaagaatccaagcatctgcatgaatggattcaaaaaggaagcaataacaataaagaacttgacaaaagaatatggacactagccaaaagtattgcaaatacaatcaatgaatatattttgtacagacctgatgtgatcgcgcaatggtggaatttagatagtaaaccgacaaaatcattaagagatttaccacctcacattaaatggcaacctttattattgagactgttaaaaacgaaaataaaatcagagccaatatgcctacaaataaatgaagttgtaaccaggcttaaaagaaaggagcattcctcaaaggaactcccccgtgatcttctgatatttggtgttagcagtcttgctcctattcaaattgaactcattcaagccttgtcctccgtggttaatgtccaaatatttctactaactccgggacaagatctatggaaacgttgtaaaagcagaagagaggaacttggcaatgattggaaagttcctatggatggaatgtggatgctaaaaacacctcgaatagaagcaagcttgggccgaatgggatccgagtttcaacaattattggaaggaagtggcgagtatcaattaggcgaatggcaagaaaaagacctcttttcaatgccagtaaaaatagctacatacaactcaaaagaaccaacttttttggaacaattacaagaaagtctagtagtaaataaggcatcaattcaacttcatagaaagcataaagacaattcattaatctttttagagtctccaggtcaaagaagacaagttcaattaattcgcgatcaaattattcagtggttagcaaccgacgatacgctccaacccagagacataataattatgacacctcaggtaaagagattagctcctttaatatcgtccgtatttaatgatatttctgcgactaatgttaatctcccatggaagataactgatcgttcccaaattgagaaaccaggtttaattcaatttatcttagagtttatagatattgcctctagtcgtttaaccgcattaaatcttgaccgtctattaacaaatccagctctacaaaaccaatttaagcttgatcaagatgaagtcgatagaatcacatattgcctatatgagacaggctttaggtggggcatcgacgaaaaagatcgcaatggtaatagtactcatagcttagagtggtgcttagaacgctggttacttggaattgtgcttccaaatgaaccaaatttcgtagaaggagatatagctccattttcttcaacttttactgttaacgagatcacaaaatggtggaatttactatctttattatgcaagcatctaaaagcgctgaggaattcaaggaaatctaatcaatgggtttttcaattaaagtcaatagttacagatcttttagagaatgaaagcaatagaacatgggaaggtgaattgttcaatataacgatcgaaaactggtcacaagattcaaatgattgcatcttaaatatacaaccacttgtaataaaggaaatacttacagaattattttctcttgagaacggtcggttcggtcatagaagtggaaaaataaccattagtgctctagagcctatgagagcaataccccatcgagtaattgttctcatgggactagatgaattagtttttcctcgtagcgaggaacgtccaagttttaatctgctagaacaaaaacgcctacttggtgatcccaataattgtgataaagatcgctatgtgcttctagaagcaataatgtcctgtcgacaacatcttttgatcacttggaatagtagagatgaaaaaacaggagagaagcttgaggcgccagcaccaattaatcaatgcatagattatcttaagaatgaattaagtgagagtgatcaattaggtttagtccaatcacctccacctaatccgctaagtaatgaaaatttcattgctactgaatatcaacaaccaattagttgtgataggcgtaatctagaagcaagaatatttcttgataactttactaagccaaaacaaactgctttaggaattccatttagatgggaaataaattataaattcaaagaaagtattttaacgaatgatatagttaaaagttggttgagagcacctcaaattacgtggcttgagcatttgcagcttaggtccagagaaaagaaaatctcaatcgaaactatagatacatttaatctaaatgagctccaaaggtaccaattactaaatgaagaattattcacacaaaacaaccttgaaagtgataacaacgttttgcctatcttattaggtgcagatgattggcaaaaaaagcttagagggcaaggtatacttcctccaaaatcagcagcagaattagagtgcgagatacttgaagcacgaatagcaagtctctcatcactaataagggacttgggggaattagaggaaaagaatctccaaataaacaatgaaaatataacctatctgataattcaagaggatattttagtcgtagaaatcggtaagttaaagtcagctacaattatgagtgcatggctacaacatctccaggtttgcctatatgacgataaaccaagaaagacattaataatttccagaagcactactaaatcttcacaacatcaatataagctctcagcagaattcactcctattttaaaaaaagatgcaatggaaatgcttcaaactatttatatgcttgttgagcaaggcttaaccgaatgttggccagtgcctcctcaaagtgggtgggaactatttaaggctaggtatatgaaaaaaactaattctaataattactttaaaaaaaaatggaaaggtagcttcaatcaacatggtgagaaccacaattcggaaatgatattatgttttggatatgattgtgacgctgagctatttctaggtaacaaaatatttgaaaattgcttaaatattctctaccaaccaatacttaacaacttcactgcaagatga

SEQ ID NO: 157177 - protein, 1103 aa, Prochlorococcus marinus subsp. marinus str. CCMP1375
MLTVYRSNRAEWLAEVLAAQLRLNKPKPFQSVEIMVNTWPTSRWLSEQIATFNGISALIEFPFPNSHLRKFVQLFLGLEVTSKDPWNTNQLTWEIIDVLPKLLKEEESKHLHEWIQKGSNNNKELDKRIWTLAKSIANTINEYILYRPDVIAQWWNLDSKPTKSLRDLPPHIKWQPLLLRLLKTKIKSEPICLQINEVVTRLKRKEHSSKELPRDLLIFGVSSLAPIQIELIQALSSVVNVQIFLLTPGQDLWKRCKSRREELGNDWKVPMDGMWMLKTPRIEASLGRMGSEFQQLLEGSGEYQLGEWQEKDLFSMPVKIATYNSKEPTFLEQLQESLVVNKASIQLHRKHKDNSLIFLESPGQRRQVQLIRDQIIQWLATDDTLQPRDIIIMTPQVKRLAPLISSVFNDISATNVNLPWKITDRSQIEKPGLIQFILEFIDIASSRLTALNLDRLLTNPALQNQFKLDQDEVDRITYCLYETGFRWGIDEKDRNGNSTHSLEWCLERWLLGIVLPNEPNFVEGDIAPFSSTFTVNEITKWWNLLSLLCKHLKALRNSRKSNQWVFQLKSIVTDLLENESNRTWEGELFNITIENWSQDSNDCILNIQPLVIKEILTELFSLENGRFGHRSGKITISALEPMRAIPHRVIVLMGLDELVFPRSEERPSFNLLEQKRLLGDPNNCDKDRYVLLEAIMSCRQHLLITWNSRDEKTGEKLEAPAPINQCIDYLKNELSESDQLGLVQSPPPNPLSNENFIATEYQQPISCDRRNLEARIFLDNFTKPKQTALGIPFRWEINYKFKESILTNDIVKSWLRAPQITWLEHLQLRSREKKISIETIDTFNLNELQRYQLLNEELFTQNNLESDNNVLPILLGADDWQKKLRGQGILPPKSAAELECEILEARIASLSSLIRDLGELEEKNLQINNENITYLIIQEDILVVEIGKLKSATIMSAWLQHLQVCLYDDKPRKTLIISRSTTKSSQHQYKLSAEFTPILKKDAMEMLQTIYMLVEQGLTECWPVPPQSGWELFKARYMKKTNSNNYFKKKWKGSFNQHGENHNSEMILCFGYDCDAELFLGNKIFENCLNILYQPILNNFTAR

SEQ ID NO: 157178 - DNA, 3420 bp, Candidatus Blochmannia floridanus
  CDS (1)..(3420): transl_table=11
atgtttatggtttatcattctaattgtttagatttatttatgagattagtaattaatgtgatgtcaaatcaaaaattatctaatcctatgaaacctgagattatcttaatagaacataagataatgtcacagtggatagaaatagaattgacaaattatttcggtatttctgcaaatattatatttatgactatacagtcatttatacgaaaaatttctatagaattgttatcagatggaatttttataagtaatttttccaaaaattttatgtattggaaatttatggaaattttgcctaaattatattctagtcaaaaatgtgctgttattcagaaatatttatgttttgacgtgaatcaaaaaaaacttggacaactttctgaacaacttgtttccttatttttggaatatttaatatatcggccagattggttagatatgtggaaatctaataaaattatagataatttaaatattgaacatcaactttggcaatctgaagtatggcgtatgtttttaacacatacacaacttcaactttatgaatttaattcggaaaatcgttgtatttttttgttacaaaataattatcagcaaattgattggactaaattacctgatagaattttcatttatggtgttacagccattgctcctatatattggaagatattgaaattattaagtgatcatattgatatatatttatgggttattaatccatgtgaaaagtattggaataatactgattacatggatgatataaataagcatgtatatcatcagtcaaataatcattcctgggaagttagaaaaaaatattattataataatagatgtaataaaagtattttaaaatcaaattattctttattgaattcatggggagaggttggttttcatacattgcatttattgagtcaattggaacgaccattatttgagatacaatcctttgtgtttcccaaaactaattcaatgttgcatattttgcaaaatgaaattttacaatttaaacaatattcatcaaatgaagtgcaaaaagagtcatctatttttaaaaaatcagcaaatatgcaaaaaaatattttaaaatcaacagatcaatcaattactattcatgaatgtcatagtctatatcgtgagatagaagtattgcatgataatttgttacgtatgttttctaatgattctgcattattacctggagaagtaatagttatggcacctaatattaattgttatacagaatctattaaatctatatttaataatatgtttaacagacaattgccattttctattttaagtgatcatagcgattatatacatcatcctattatatcaactatattgaatatattagctatacctactagtcgttttactgttgaggaaattttttcattattatcaataccatctatagcatctaaattttctatagatgatgaagcaatgaaattattgcgtttatggattgttgagtctggcgtaagatggggattagaccaggatactcaagagaattttaatttgccagttactgaatggaatacttggtattttggatttaaaagaatgttattaggttatgcaataaaaaatcaaaatggatcatggaaaaatatttttccatataattatataagcgaagaatatgtacacgttgtatctggacttggagaatttttggaaatattaaaaaaatggagaaatcgtttaaatggtgcttatacattacaaaaatggatgttatattttagagaaatgattaatgattttttcgattttagtaaattaaatgtagaagaaaatcaagcactttttttgttaaaaaactgttggactaatatattggaatcaggtattcaattaggatatattaatactgttacaataaatatattaagagataagttattaattcaattaatgaatcaaaaaaaaaattatcaatttttaccaaatgctattaatttttgtaatattactccgatgtgttttatttcgtgtaaaattttatgtatcataggtatacatgacaatgagtttcctagagatagattctcgtatgattttaatttaatatcaaaaagatttagaataggagataacaatatatgtggtcaagattattatgcatttttgctagcatgtttgttacccaaggaaaaattgtatttgagttttataaataaattggcgttttgttatggtaattctataagctcatcaatttttattgatgagcttatagaatatattgctcaaagattttatttaataggtgatcaaaatttagatattatcagtaatatcaagcgtatacgtaagtatttattgtataaatatagttgtatgccattttcttgtagcaattttattgcatattcaaaaaaacaaagttttgctaatgaatggttagctgctgcttatgctgataagaatataacagtatttactcagtctcagcaacaatttttgactacttcgttacctcacattattgtttctacgatattgttacgtgatttatatgatttttatcgacatccagtacgtatgtggtttcaaaagcgtttaaaggtatatttttatcagtgtactcatgatattttattaaatgatgaaactttttttgtaagtaatttacgtcgttttcaattgaatgttaaattaattgattattttatacataataaaaatattgatacactttatcgagaattttatgattctggaatgttgccttatggctcgtttggtcaattatattggatagaacaatgtgaaaagatgtataaattagcaagtaaaattaaacgatattattcatctaagatatttacattaaatataacttttaaaattgaaactattaaattaatcggtgaattacattcagtacaagaaaatggattaatccgttggaaaccggcttatctttcaatgagggattgttttttagtatggttggaacatttaatatattgtttttcaggagggaatggagagagttggttatttggtacagatagtacatggcattttcctaatttttctaagatacaagcgcaagaattattattttttttaatttcaggatattgtttagggatcaatgtacctttattgttgttatataagtctggtggtgcttggataaattatgtatttgattggaataatagagttatatgttcagatccagatattcataaaaaggcttgtcaaaggttgatatatacttggcagggtagtagcgatgatacacagttttcttatttaagggaaagtcaagatccatatttacgtaaacttattccattatatttaaacgaagaggatatacgtattattactgatgtttcaaaagattatttgctggatcttatgagatatagaattttatag

SEQ ID NO: 157179 - protein, 1139 aa, Candidatus Blochmannia floridanus
MFMVYHSNCLDLFMRLVINVMSNQKLSNPMKPEIILIEHKIMSQWIEIELTNYFGISANIIFMTIQSFIRKISIELLSDGIFISNFSKNFMYWKFMEILPKLYSSQKCAVIQKYLCFDVNQKKLGQLSEQLVSLFLEYLIYRPDWLDMWKSNKIIDNLNIEHQLWQSEVWRMFLTHTQLQLYEFNSENRCIFLLQNNYQQIDWTKLPDRIFIYGVTAIAPIYWKILKLLSDHIDIYLWVINPCEKYWNNTDYMDDINKHVYHQSNNHSWEVRKKYYYNNRCNKSILKSNYSLLNSWGEVGFHTLHLLSQLERPLFEIQSFVFPKTNSMLHILQNEILQFKQYSSNEVQKESSIFKKSANMQKNILKSTDQSITIHECHSLYREIEVLHDNLLRMFSNDSALLPGEVIVMAPNINCYTESIKSIFNNMFNRQLPFSILSDHSDYIHHPIISTILNILAIPTSRFTVEEIFSLLSIPSIASKFSIDDEAMKLLRLWIVESGVRWGLDQDTQENFNLPVTEWNTWYFGFKRMLLGYAIKNQNGSWKNIFPYNYISEEYVHVVSGLGEFLEILKKWRNRLNGAYTLQKWMLYFREMINDFFDFSKLNVEENQALFLLKNCWTNILESGIQLGYINTVTINILRDKLLIQLMNQKKNYQFLPNAINFCNITPMCFISCKILCIIGIHDNEFPRDRFSYDFNLISKRFRIGDNNICGQDYYAFLLACLLPKEKLYLSFINKLAFCYGNSISSSIFIDELIEYIAQRFYLIGDQNLDIISNIKRIRKYLLYKYSCMPFSCSNFIAYSKKQSFANEWLAAAYADKNITVFTQSQQQFLTTSLPHIIVSTILLRDLYDFYRHPVRMWFQKRLKVYFYQCTHDILLNDETFFVSNLRRFQLNVKLIDYFIHNKNIDTLYREFYDSGMLPYGSFGQLYWIEQCEKMYKLASKIKRYYSSKIFTLNITFKIETIKLIGELHSVQENGLIRWKPAYLSMRDCFLVWLEHLIYCFSGGNGESWLFGTDSTWHFPNFSKIQAQELLFFLISGYCLGINVPLLLLYKSGGAWINYVFDWNNRVICSDPDIHKKACQRLIYTWQGSSDDTQFSYLRESQDPYLRKLIPLYLNEEDIRIITDVSKDYLLDLMRYRIL

SEQ ID NO: 157180 - DNA, 3312 bp, Prochlorococcus marinus str. MIT 9313
  CDS (1)..(3312): transl_table=11
ttgctgacgatctaccgcagcaacagagcggagtggttagctcgagtgttggcggagcagctgcgtctggcaccaccaggtctatttgactcagtggatgtcctggtgaacacctggcccacaagccgctggctgggggaacagttggcaagcgtgaatggcatcagtgctttggtgcgattccctttcccaggatcacgtttaaggcaattggttcggatgatattggggatcgatagtgatgctgaagatccctggcgggctagtcgactcgtttggcctctgcttgatttgttgccacagcttttggagactgaagaagctgcgccattgagagaatgggtcaatcggcagccatctcggccaggccacctcaaccgagtgcaatggcagttagccagaagcattgccgatgcctttgacgactatgcgctttaccgccccaagttgatccatcaatggctggagggcagtgatcggcttttgaactcatcgcaggagatgcctttaaccctgcgctggcaaccccagttgctgcgtttattggctgaacgtttgcaggttgaaccgttcgggattcaggtgcatagggctgtttcaaagctgcgcagcggagacaaccccgccatggcattgccaagtcaactgcggctttttggtctgagcagtcttgctccggtgcaagtggagttgattcaggccctctcgggttttgtggacgtacagatatttctgctgaccccctgcccggatctttggcagcgatgtcgtagcagaagggagatgttggggcatcagtggaccgagccggctgatggtttgtggttgctcgaagcgccgcgcttagaagccatccttggacgcatgggcgcggaatttcagcagttgctggaaggtggcggtgagagtcagcttggccagtggcaggagggtgatctatttgccgcgccggccaccatggcttgtgaatccgggaaagaacctacgttgcttgagcagcttcagcagcagcttgtctcgccggaggatcatcaacctctgcggcgcaggcaagaggacagttctttgcagtttttggcttgccctgggcaatggcgccaggtgcagttggtccgcgatcagatcttgcaatggtttgctgccgaccccagcctcgaaccccgtgatgtgttggtgatgaccccacaggtcaatcgttttgctcctctgctcgcctcggtgttcaacgatgctgcagccactggcgtggagcttccctggcggctcacagatcgcagccagcaggacagccctgggctgacgcaggggatgttgcaactgcttcagatcgcaggcgagcgattgactgccaccgcccttgaaggcttgctcgctaatccggcaatacagcagcagcaaggtttcagccaggacgatgccagtagccttagtcgctgtttacagcgcacaggatttcgctggggacttgatgccgaggagcgtggtggtgatgagacccatagcctcagctggtgcctggatcgctggctgcttggcttggtgttgcccagcacaccaggcctggcccctggaggagcagcacccttcgcagaggggctggaaccagcacagcttgcgaagtggtggcagcttttggctcagttctgccggcagctgaaagagtttcgtcgtgctcgaacttgtggagcttgggtagagcttctacagggttttgtcgaggagttgtttggtgatggtggctcttgggcctgggagcggcagtgcctgctgattgctttggaggattggcgtcagattggtgctgactgcacgttgttgctggaagcggctgttgtagcagatgtgttgaatgaagctctctctgcagatagcggtcggtttggacatcgcactggtgccctcacagtgagtgctctggagccgatgcgtgccatccctcatcgtgtgatcgtgctgatgggattggacgccgatgttttccctcgccatcgtgagcgagctggctttcatctattggagcagcagcgtcagctaggtgatccacgcagtagtgatcaagatcgttatgtgcttttggaagcattgatgtcgacccgacagcatctgctgatcacctggaacagccgcgatgagcacacgggcgaatgtcgcccagctgctagccctgtgcagcaatggcttggacggctgcagcatgagctcagcgatgagacatttgagggcctatgtcgagaaccagccgccaatccccttgagcgcagtaattttctatctcaggggagccaaccacctcctagctgtgaccgtcgccatttcgaggcgcgccgctggttggataaaactctagcgccaccaccccttgcccttgcgcttcctttgagttggggccctgtgaaagaggaagtttcaactgctatctcatctgaattgttgttgcgctggttaatcgctccccaactgatttggttggagcaatttcagttaacagcccgtgaatggcttgaccctgttgaagaccttgagaccctcgatctagatgaatggcatcggcatggtttgctcaggcaacgtttgtcagagctgcttggcaatctccctactgatgagaatgcattgctgcaggaatcagcagcaggtgattggaagcatcgctatgccggtcaaggcacccttcctccaggagcagctgcgacgttggagtgcgaacgtctcgagaagcgttggcaacatttacaggcaacgctactgagcatgggaccatgctcgacacgacgtcttgagttggcggatggctccaggcaaatgctctgggctggggacacggtcgtggtggtgcaaccaggtcagttgaagtcaaggggggtgatggagggatggctaagccatttgcaggtctgcgcaaatcacacgcttacggcggcaactgtcgtcgtagcccgttgtggatcagcagccaagaaggatcaatttgagatagctctgcgttggcagccacttccagccgagcaagcaagagaacaactcattgctttgcaggctttggcctgtcagggtttgagtcagtgttggccagtgccaccgatgagtggttgggcctacgccaacgccaacaacaaatcggctggtaggggtgaacaagccttccgtcagtcttggagtggcggatttaatgttcagggtgagcgtgaacgggctgagatgcagctctgctttggtctgaactgcgaagcttcagagcttctcaacagcgctggttttgagcaggcatacacaagcctttatggccctttgtttgaggcattggcgatctag

SEQ ID NO: 157181 - protein, 1103 aa, Prochlorococcus marinus str. MIT 9313
MLTIYRSNRAEWLARVLAEQLRLAPPGLFDSVDVLVNTWPTSRWLGEQLASVNGISALVRFPFPGSRLRQLVRMILGIDSDAEDPWRASRLVWPLLDLLPQLLETEEAAPLREWVNRQPSRPGHLNRVQWQLARSIADAFDDYALYRPKLIHQWLEGSDRLLNSSQEMPLTLRWQPQLLRLLAERLQVEPFGIQVHRAVSKLRSGDNPAMALPSQLRLFGLSSLAPVQVELIQALSGFVDVQIFLLTPCPDLWQRCRSRREMLGHQWTEPADGLWLLEAPRLEAILGRMGAEFQQLLEGGGESQLGQWQEGDLFAAPATMACESGKEPTLLEQLQQQLVSPEDHQPLRRRQEDSSLQFLACPGQWRQVQLVRDQILQWFAADPSLEPRDVLVMTPQVNRFAPLLASVFNDAAATGVELPWRLTDRSQQDSPGLTQGMLQLLQIAGERLTATALEGLLANPAIQQQQGFSQDDASSLSRCLQRTGFRWGLDAEERGGDETHSLSWCLDRWLLGLVLPSTPGLAPGGAAPFAEGLEPAQLAKWWQLLAQFCRQLKEFRRARTCGAWVELLQGFVEELFGDGGSWAWERQCLLIALEDWRQIGADCTLLLEAAVVADVLNEALSADSGRFGHRTGALTVSALEPMRAIPHRVIVLMGLDADVFPRHRERAGFHLLEQQRQLGDPRSSDQDRYVLLEALMSTRQHLLITWNSRDEHTGECRPAASPVQQWLGRLQHELSDETFEGLCREPAANPLERSNFLSQGSQPPPSCDRRHFEARRWLDKTLAPPPLALALPLSWGPVKEEVSTAISSELLLRWLIAPQLIWLEQFQLTAREWLDPVEDLETLDLDEWHRHGLLRQRLSELLGNLPTDENALLQESAAGDWKHRYAGQGTLPPGAAATLECERLEKRWQHLQATLLSMGPCSTRRLELADGSRQMLWAGDTVVVVQPGQLKSRGVMEGWLSHLQVCANHTLTAATVVVARCGSAAKKDQFEIALRWQPLPAEQAREQLIALQALACQGLSQCWPVPPMSGWAYANANNKSAGRGEQAFRQSWSGGFNVQGERERAEMQLCFGLNCEASELLNSAGFEQAYTSLYGPLFEALAI

SEQ ID NO: 157182 - DNA, 3222 bp, Synechococcus sp. WH 8102
  CDS (1)..(3222): transl_table=11
ttgctgacgctttaccgcagcaatcgggctgaattcctggccaccttgctggcccgtcagttgctggaggagcgaccggaccccttcgagacggtggaggtgttggtgaacacctggcccaccagccgctggcttggcgagcagctcgccacggctaatggcatcagttcgctggtgcgctttcccttccccggcagtcgtttgcggcagctggtgcgacgggtgctcgacctccccgatcaggagcaggacccctggcgggccacctccctggtctgggctgtgctggagcagatgccggccctgttggagcagcccgttgcccgaccgctgcagctctggttgcagcaacgagatggtggtgatgcttcggggctgagccgggatcgttggcagctggctcgcgccatcgccgatgccttcgacgactacgcgctgtatcggcccgaaaccttgcacagctggattcagagccagggcagccgtgctgcatccgcagaaacggactggcaaccgtggctggccaggcagctggcggcgtctctgcatcgccaaccgttcggcttgcaggtgcagtccgctgtggagcggctgcgctccggcgccgtggacccccaggtgctgccaaaggtgatccgtctgttcgggatcagtgccctggcgccggtgcaggtggaactgatccaggccctctcaggcagcaccgacgttcaggtgtatctgctcaccccctgccgcgatctctggcagcgctgcggcaatcgccgtgagcagctgggagcaacctggacagagccccccgatgggggctggttacagcaggcaccgcgattggaggccatgctcggacggatgggggccgagttccagcagctgctggagggcagtggcgacagtcagctgggggaggtgcgcgagggggatctgtttgccgatcccgtccgcattgctgagggggaaggtcgctccgccacgttgctggagcagttgcagcagcagctggtggaaccgggctgccgtgaatctctcgatcgagatcttgacgaccgctccttgttgttccaggccgctccagggccgtggcgggaggtgcaactggtgcgcgatcaggtgttgcagtggctggcggcggatccagagcttgagcctcgggatgtgttggtgatgaccccgcagatcgaccgttatgccccactcctgagctctgtgctcaacgaccgtgatgcgattggagtggatctgccctggcgtctcaccgatcgaagccagcagagcacccctggcctgacgatggtgatgctggagttgctggacctggcgtcaggtcgcctgaccgccactgggctggaacggttgttggccaatcccgccctacagacgcaacaggggctcagcggtactgaggcgtctgccttgacccgctgcctgcagcgcacgggcttccgctgggggctcgatgcccgggagcggggcggtgatgagacccacagcctcagttggtgtctggatcgttggttgctgggtctggcgctgccgcaacgggatggcctggcacccggcggggcggccccgtttcatcaggatctcgatccgcagcggctggtgcgctggtggagcgttctggatcggctggtgcgctggttgcagcagctgcgacgaccacggacctcgacggcctgggtggagttgctgcaggccgtgctggaggatctcttcgctgacggcggtgcctggagctgggagcgtcagggttggtctgcggccctggcggaatggcagcaacgggcagcctcctgctcgctggagctcgaggtggcggtggcagctgaggtgctggcggaggccctgtcggtggacagtggccgcttcgggcatcgcagtggtgcgctcacggtgagtgcgctggagccgatgcgggcgatcccccacaaggtgattgtgctgatgggtctcgacgacggggtgttcccccgtgtggatcaacggcctgggttccatctgttggagcagcgccgctggctcggcgacccgcgcgggggtgatcaggaccgttatgtgctgctggaggcgctgatgtccgcgcggcgtcatctgctgatcagttggtgcggccgcaatgaacacaccggtgagcctcggccggctgctgctccggtggaacagtggttgcaggacctgacaaggcagctgggcactgaggccagcgcggggctgtgcatcgagccggatcccaacccactggatcgcagcaactttcaggttgccggccatggccagcccctcagctgtgatcgccgccaactggcggcgcgacgctggctggaccagcatcagagccatgctgcgacggccggcctggcctggccgctgcactggagtgcgccggaccctgaggtcacgatcgacccacgcagcgatgaggagctgttgcagtggctggtggaccctcagtcagcctggctgcggcagctgggcctccacccagctgagcgggtggatcctgtggaggatctcgaggccctgacgctcagcagcctgctgcaggcccaggtgttgaatcaggatctggaggatcacctgctggcggccgagacgccggcatggtgcgagacgttggcgggccagggggtgtttccccccgcagcaggggctcagctggaggagggaatcctcagccatcgactccaggcgttgcagctgcagctggaccggctcggacgttgcagccgccagggaacgctgctgatggccggcgacattcaggtggtggttcagcccggtcgtttcaccccccgtggtctgatgcggggctggttgcagcatctaaggctctgcgcagacgatgctgtcttcggcgggagcgccgtcatcgctcgggcagacaagggcgatgacgccaagccccatgtgcgttggggacgtctcgaacctgcggtggcccaggcccagctgctgacgctgcagcggttggctcagcaggggcagcatcagtgctggccggttccccccagaagtggctggctgttgatgagcagggatcactacaaggccggcagcggcgtcgccgcttttcaagacggctggatccgggagcgccaggacccccagcagcggctgtgcttcggcgccgatgctgaggctgaccagctgttgcagagccagggcttcgagcaggcatgtgcgttgctctacaaaccgatgctgcaggccttggtgcactga

SEQ ID NO: 157183 - protein, 1073 aa, Synechococcus sp. WH 8102
MLTLYRSNRAEFLATLLARQLLEERPDPFETVEVLVNTWPTSRWLGEQLATANGISSLVRFPFPGSRLRQLVRRVLDLPDQEQDPWRATSLVWAVLEQMPALLEQPVARPLQLWLQQRDGGDASGLSRDRWQLARAIADAFDDYALYRPETLHSWIQSQGSRAASAETDWQPWLARQLAASLHRQPFGLQVQSAVERLRSGAVDPQVLPKVIRLFGISALAPVQVELIQALSGSTDVQVYLLTPCRDLWQRCGNRREQLGATWTEPPDGGWLQQAPRLEAMLGRMGAEFQQLLEGSGDSQLGEVREGDLFADPVRIAEGEGRSATLLEQLQQQLVEPGCRESLDRDLDDRSLLFQAAPGPWREVQLVRDQVLQWLAADPELEPRDVLVMTPQIDRYAPLLSSVLNDRDAIGVDLPWRLTDRSQQSTPGLTMVMLELLDLASGRLTATGLERLLANPALQTQQGLSGTEASALTRCLQRTGFRWGLDARERGGDETHSLSWCLDRWLLGLALPQRDGLAPGGAAPFHQDLDPQRLVRWWSVLDRLVRWLQQLRRPRTSTAWVELLQAVLEDLFADGGAWSWERQGWSAALAEWQQRAASCSLELEVAVAAEVLAEALSVDSGRFGHRSGALTVSALEPMRAIPHKVIVLMGLDDGVFPRVDQRPGFHLLEQRRWLGDPRGGDQDRYVLLEALMSARRHLLISWCGRNEHTGEPRPAAAPVEQWLQDLTRQLGTEASAGLCIEPDPNPLDRSNFQVAGHGQPLSCDRRQLAARRWLDQHQSHAATAGLAWPLHWSAPDPEVTIDPRSDEELLQWLVDPQSAWLRQLGLHPAERVDPVEDLEALTLSSLLQAQVLNQDLEDHLLAAETPAWCETLAGQGVFPPAAGAQLEEGILSHRLQALQLQLDRLGRCSRQGTLLMAGDIQVVVQPGRFTPRGLMRGWLQHLRLCADDAVFGGSAVIARADKGDDAKPHVRWGRLEPAVAQAQLLTLQRLAQQGQHQCWPVPPRSGWLLMSRDHYKAGSGVAAFQDGWIRERQDPQQRLCFGADAEADQLLQSQGFEQACALLYKPMLQALVH

SEQ ID NO: 157184 - DNA, 3198 bp, Chromobacterium violaceum ATCC 12472
  CDS (1)..(3198): transl_table=11
atgctgtttctctaccaatccaaccgtctcgagcaactgggcgagctgttctgcggcatgacccaggcgatgccgctggccgacccgttcgcggccgagacagtgatcgtgcagagccggggcatggggcgctggatcacgctggacgtcgcgcgcaaggccggcatcgccgccaacatcgatttcgcgctgcccgcggccttcgcctggcggctgatgcagaaggtgatgccggatctgccgcgcaaatcggccttcgtgcccgaagtgctggcctggaggctgctggcgctgttgccgtcgctttccggcgagccgttcggcccggtgctgcattacctggagggcggcgaggccgcggctttcgagctggccggcaagatcgccgacatcttcgaccaatatctggtgttccgcccggactggattcgcgcctgggaggccggcgagctgctgggcctgggcgaggacgaggcctggcaggcctcgttgtggcggcggctggccgaaagcgacccgggccgccaccgggtgcggatgctggaccagttcttcgccgatctgaagcccgagcacctgccgccacgggtaacgctgttcggcatcgccagcctggcgccgatgtacctggcgctggtcaagcggctgtcccagctgaccgatgtctgcctgttcacgctgaacccatgcgaggcctactggggcgacatcgtcgacgcgcgccggctgctgaagctcaggcaggccggcgacctgttcgccacccagggccatccgctgctgtcgtcgctgggcaagcagggcagggacttcttcgagctgatcgccgaggacgccgagctggacgccaagccgctgttcgccgcgcccaagggcgacggcctgctggcccggctgcagcgcgacatcctgcagctcaacgatccgtcgcaactgccgcggcctttcgatccggccgacgcctcgatcgaagtgcacgcctgccatggcccgatgcgcgagctggaggcgctgaaggacaggctgctggcgatgttcgccgccgaccccaagctcagcccggccgacgtggcggtgctgacgccggacatcaacgcctacgcgccgtacatcgacgcggtgttcggccgccgcgacgacgcgcccaacattccgtacagcatcgccgaccgccgcgtcgagcgcgagcagccgctgctgtccaccttcgccgccgtgttgaagctggccgattcccgcttcgccgccgacgaggtgctggcgctgttcgactgcccggcgctgctggcgcgcttcgatctggccgacgccgatctcgccttcatccaggactgggtgcgcgacgccggcatccgctgggggcgcgacgccgcgcacaaggcgtcgctgggcctgccggccgaagccgcctatacctggcgctggggactggaccgcctgctgttgggcaccgtgctgccgccggcgctggccggcgacgacgccgggctgttcgccggcctgctgccttacaccgcggcccaagggcagctgggcgagacgctggcgcgcttcgccggcttctacgacgcgctggacgcgctggcggacgcgtggtcgcagccggccgcgccgcagcaatgggcgcaacgcttccaccaggcttgcgaccgcctgttcctggccgaaggcgacgacgaggcggcgctggagctgctgcgcgaggccttggccgaattggccgagaacgcggacctggccggcttcggccagccggtgggcctggcggtggcgcgcgactggctgctgcgcaagctgtcctcgtcttcggcccagggctttttgtccggcggcgtgactttctgcgcgatggtgccgatgcgctcgataccgttccaggcgctgtgcctgatcggcatgaacgacggcgcctacccgcgcgacgagcggccggtcagcttcgacctggtggcgcgcaatccgcgccgcggcgaccgctcgcgccgcttcgacgaccgctatctgttcctggaggccatcctgtccgcccgcggccggctgtacctgtcttatgtcggccagtcggcgcgcagcggcgagccgctgccgccgtcgccgctggtgtcggagctgctggacacgctgtcggcgatgtgcggcgaggacatggcggcgcggctgacgctgcgccatccgctgcagccgttctcgcccaaggccttcgatggcggcgacgcgcggctggccagcttcgagccggccttcgccgccgcgctggccgcgccgccggccgagcccgcgcctttcgtcgcgccgctgccggacgagggcgcggcgacggtggtcaatctgcatgatttcatccgcttctggcagaacccggcgcgggcttggctggccgaccggctggcgctgcgggtcgcctacagcggcgacgcccagccggcgcgggagccgttcgcgatggcgcgcgacgccagccacgcgctgcgccgccagctggtggaggcgatgctgcacggcaagccgccgcagccggtgcggcagcgggtggccgccgccggcctgctgccctgcggcgagctgggacaggcctggctgcaggaggaggggcgcgccagcgtgcggctggccggccgcttgccgggcgcgttgcgcggcgaggcgctgccgccgcagccggttcacctggagatcgccggcttcacgctggtgggcgagctgtatggcctgaggcccgagggccggctggacttcatcgtcggcaagatgaacgccgcccagcgcgtcgcgctgtggctgagccatctgatcctgtgcgcgtcgcggccggcgggcatcgcgccgcacagcgcctgctacgacgacgccggcagcacgctgctccatgacgagatcgacgccgccggcctgctcgtgccgtggctggcgcgctggaagcagggccaggcgcagcccttgcccttcttcggccgcaccagctgggcctatgccgaggcgttggccaagaacccggacaagccggacaaggcgctggccgccgcctggcagaagtgggagcccaatttcatcctcggcgacggcgtcgcgcagaaagacgagccggcgatcgcgctggctttccgccaccagtcgccgctggaagaccctttgttcgcccagctggcggagacgctgctgctgccgctggccgaacgcctgcagggaggcgaggcatga

SEQ ID NO: 157185 - protein, 1065 aa, Chromobacterium violaceum ATCC 12472
MLFLYQSNRLEQLGELFCGMTQAMPLADPFAAETVIVQSRGMGRWITLDVARKAGIAANIDFALPAAFAWRLMQKVMPDLPRKSAFVPEVLAWRLLALLPSLSGEPFGPVLHYLEGGEAAAFELAGKIADIFDQYLVFRPDWIRAWEAGELLGLGEDEAWQASLWRRLAESDPGRHRVRMLDQFFADLKPEHLPPRVTLFGIASLAPMYLALVKRLSQLTDVCLFTLNPCEAYWGDIVDARRLLKLRQAGDLFATQGHPLLSSLGKQGRDFFELIAEDAELDAKPLFAAPKGDGLLARLQRDILQLNDPSQLPRPFDPADASIEVHACHGPMRELEALKDRLLAMFAADPKLSPADVAVLTPDINAYAPYIDAVFGRRDDAPNIPYSIADRRVEREQPLLSTFAAVLKLADSRFAADEVLALFDCPALLARFDLADADLAFIQDWVRDAGIRWGRDAAHKASLGLPAEAAYTWRWGLDRLLLGTVLPPALAGDDAGLFAGLLPYTAAQGQLGETLARFAGFYDALDALADAWSQPAAPQQWAQRFHQACDRLFLAEGDDEAALELLREALAELAENADLAGFGQPVGLAVARDWLLRKLSSSSAQGFLSGGVTFCAMVPMRSIPFQALCLIGMNDGAYPRDERPVSFDLVARNPRRGDRSRRFDDRYLFLEAILSARGRLYLSYVGQSARSGEPLPPSPLVSELLDTLSAMCGEDMAARLTLRHPLQPFSPKAFDGGDARLASFEPAFAAALAAPPAEPAPFVAPLPDEGAATVVNLHDFIRFWQNPARAWLADRLALRVAYSGDAQPAREPFAMARDASHALRRQLVEAMLHGKPPQPVRQRVAAAGLLPCGELGQAWLQEEGRASVRLAGRLPGALRGEALPPQPVHLEIAGFTLVGELYGLRPEGRLDFIVGKMNAAQRVALWLSHLILCASRPAGIAPHSACYDDAGSTLLHDEIDAAGLLVPWLARWKQGQAQPLPFFGRTSWAYAEALAKNPDKPDKALAAAWQKWEPNFILGDGVAQKDEPAIALAFRHQSPLEDPLFAQLAETLLLPLAERLQGGEA

SEQ ID NO: 157186 - DNA, 3390 bp, Photorhabdus luminescens subsp. laumondii TTO1
  CDS (1)..(3390): transl_table=11
atgtttaaggtttatcattctaatcaattagatcttcttaaggaattgatagcaatattgatcgggggtaacccactgactgatccatttgcgcaggaagtcattttggtacaaagcccaggtatgtcacagtggctgcaaatccaactggccgaaagaataggcatatcagctaatatttcatttccgcttcccgctacgtttatttgggatatgtttaccaaagtattgcctgatattcctaaagaaagtgcttttagtaaagatgctatgacatggaaattgatggcgttattgcctcaattgctgcctgaagcagagtttgttggactcaggcactaccttgatcaagattttgataaacggaagattcatcaattagctggacgggttgctgatctgtttgaccaatatctcgtttatcgcccgcaatggttggaaagttggcagcaaggtcagcttattgatggtttgagtgataatcagttgtggcagaaaagattatggctggaactgacgaaatatactcaccagttacaacaacctcaatggcatcgtgctaatttgtatcagcgttttatttcgatactggaaaataatactgaacaggaaaatagtactgatttttcagcttgtttaccgaaacgggtatttatctgtggcatttctgccttaccaccggtctatttacaagctttacaggcattggcacggcacattgatattcacctgatgtttaccaatccatgtaaatattattggggagatattcagaattatgcttttttggcaaaactgagtagccgtaaaccacgtcattataagagcgaacaggagctggaatattttaaagatcctgataatgctcaatcattgtttaacggtgacggtgaacaagatgtcagtaatcccttgttggcatcgtggggacggttgggccgtgataatctctatttattgtcgcagcttgagcagagttcggatattcacgcttttgttgaattagaacaggataatctattacatcaattgcaaagggatattctctatctggaagatcatgcccaaattggttcaacaaaagaaacatttgaaaacagtttgaaaaaaagagtacttgatccgttggatcgttctttatctttccatgtttgccatagccctcaacgtgaagtggaagttttacaggatcagctattgagattattggaagataatccatcgctgacgccaagggatattattgtgatggtcgcggatattgacagttatactccctatgttcaggcagtatttggtaatgtctctgttgaacgctatattccatttgctatttctgatcgtaaagctcgtcaggcacattcgattttacaggcatttattacactgcttgatttacctcaaagccgttttacaacagagcaggttttagcattgttggaagtacccgcgctggcgaataaatttgacatacatgaagatggtttgcgtttgttaagacgttgggttgaagaatcaggtgttcgttgggggctgaatgacgataatgtcgaagagctatctttaccggtgacaggtcagcatacctggcgttttggactgacccgaatgttattgggttatgcaatggatagccgatcgggcccttggaaagaggtattgccttatgatgaatctagtggtttagctgcggagcttgccggccaattggctgaatttttaatgcaattaagctattggcgcaaaattcttgctgagagccgggcattaacgggttggttacctgtctgccagcagttgctggaaacattttttgtctcagataatgagactgaattagtactagcaatgatagaacagcaatggcagaaagtcatagtcaatggcttgaatgcccgttatcaggaaagtgtgccattggttttattgcgagatgaattggcacttcagtttgataatgaaaaaatcagtcagcgttttctcgccggatctgtcaatttttgcactctaatgccgatgcgttctattccctttaaggtcgtctgtttattgggaatgaatgatggtatttacccccgttcaattccaccgcttggatttgatctgatggcggaaaaaggtcagaggggagacagaaaacgacgggatgatgaccgttatctattccttgaagctttgatatctgccgaacggtttctttatatcagctatattggtaagtctattcgtgatgatacggaatgtaatccttccgtgctggtgaatgaattactggattatgtttgccaaagtttttgtttaccgggaaatgaaaaactgaatgttgatgaaagtgctacccatgttagaaaacatctgttgtatcttcatgcccgcgttccatttgcaccggaaaattttataccgggcagttatcagcaaagctatgccggggagtggttaccggcggcaactgaacaaggtgcagcatacgctgaattttgccaatctattgaaatggcgcaaattcaagaaattacacttgataatttgagcagtttttaccgccatcccgttcggttttttttccaacgttgcttgaaagtaaatttcgttattgaagaaacggaattaccggaggaagaacctttcgttttagataatcttcaacgttatcagtttaatcagctattgttaagtgcactaattgaacagcaatcgcctgaaccacttttcaatcggctgcgtgctgctggaggattaccttttggtgcttttggtgaggtttattggttaagacagcaaaaagagatgcagcctttggcggataaaattcgtgaacaacaaatggaaactttatctgtcgatttacatcataatttaggcccggtgattctgacagggcgtattaataaggtgcaaccggatggcttgctacgttggcggcctgccagtttgacagccaatgatggcatgcaattgtggattgagcatctggcttattgtctgacaggtggtgagggtgaaagtcgcagctatgggcgtgatggcaacgaatggcgtttcgctcctgtaccttcagagtacgctaaagattatctgaatcaattgattgaaggctatcagcgaggaatatcagcacctttaccgctgttttgtaaaagtggttgggcgtggctttcagcatgtatgaataaagagactggtgagattgatgatagtgatgaaattcaatcaaaggctgaaagtcagttattgaaagcatggcttggcgatcagggacgcagaggcgaaggggatgatccttatatccaacgagctttcaggcaagtggataaatcatttttggcaaaatttaaacaggaagcgctcagttatttgttaccgatagcgcgatatcagaatacatag

SEQ ID NO: 157187 - protein, 1129 aa, Photorhabdus luminescens subsp. laumondii TTO1
MFKVYHSNQLDLLKELIAILIGGNPLTDPFAQEVILVQSPGMSQWLQIQLAERIGISANISFPLPATFIWDMFTKVLPDIPKESAFSKDAMTWKLMALLPQLLPEAEFVGLRHYLDQDFDKRKIHQLAGRVADLFDQYLVYRPQWLESWQQGQLIDGLSDNQLWQKRLWLELTKYTHQLQQPQWHRANLYQRFISILENNTEQENSTDFSACLPKRVFICGISALPPVYLQALQALARHIDIHLMFTNPCKYYWGDIQNYAFLAKLSSRKPRHYKSEQELEYFKDPDNAQSLFNGDGEQDVSNPLLASWGRLGRDNLYLLSQLEQSSDIHAFVELEQDNLLHQLQRDILYLEDHAQIGSTKETFENSLKKRVLDPLDRSLSFHVCHSPQREVEVLQDQLLRLLEDNPSLTPRDIIVMVADIDSYTPYVQAVFGNVSVERYIPFAISDRKARQAHSILQAFITLLDLPQSRFTTEQVLALLEVPALANKFDIHEDGLRLLRRWVEESGVRWGLNDDNVEELSLPVTGQHTWRFGLTRMLLGYAMDSRSGPWKEVLPYDESSGLAAELAGQLAEFLMQLSYWRKILAESRALTGWLPVCQQLLETFFVSDNETELVLAMIEQQWQKVIVNGLNARYQESVPLVLLRDELALQFDNEKISQRFLAGSVNFCTLMPMRSIPFKVVCLLGMNDGIYPRSIPPLGFDLMAEKGQRGDRKRRDDDRYLFLEALISAERFLYISYIGKSIRDDTECNPSVLVNELLDYVCQSFCLPGNEKLNVDESATHVRKHLLYLHARVPFAPENFIPGSYQQSYAGEWLPAATEQGAAYAEFCQSIEMAQIQEITLDNLSSFYRHPVRFFFQRCLKVNFVIEETELPEEEPFVLDNLQRYQFNQLLLSALIEQQSPEPLFNRLRAAGGLPFGAFGEVYWLRQQKEMQPLADKIREQQMETLSVDLHHNLGPVILTGRINKVQPDGLLRWRPASLTANDGMQLWIEHLAYCLTGGEGESRSYGRDGNEWRFAPVPSEYAKDYLNQLIEGYQRGISAPLPLFCKSGWAWLSACMNKETGEIDDSDEIQSKAESQLLKAWLGDQGRRGEGDDPYIQRAFRQVDKSFLAKFKQEALSYLLPIARYQNT

SEQ ID NO: 157188 - DNA, 3489 bp, Vibrio vulnificus YJ016
  CDS (1)..(3489): transl_table=11
atgtttactgtctatcactccaatcaagtggatgtgctcaaatctctattggtggaactgattcgcctcaatcctttgcaaaatcccttcgacaaagagcaaatcttggtgcaaagcccaggcatgtctcaatggttgaaaatggaactggcgaaagagtttggtgtggcagcaaacatcgaatttccgctacccgcgacatttatctgggatatgtttacccacgttttggcggatgtgccaaaacgcagtgcttttaacaaagaagcgatgacgtggaagctgatgcatttgttgccgcagcaacttgcactggcggagttctcgcccttagctcgctatcttcaagacgatgaagaaggcgccaagctttaccaactgtcggaaaaaattgccgatatttttgatggttatttggtgtatcgccctgaatggatacgtgattgggaagcggggaaggccgtggctgagattggtgatgagcatccttggcagcccatgttgtggcaagcactgtatgaccataccgtcgcgcttgggcaatcgccgtaccatcgcgccaacctatacgaacacttcattgatagcttagaaaactacactggccagtttgaacgcttgccgcagcgcttgtttgtttttggcattacctcattgccgccacgctacatggacgcgcttaaagcgctcggtcagcatattgacgtgcatctgatgtttaccaacccgtgtcgatactattggggtgaagtgcgcgatcgaaaatttctggctcgtttggcggcgaaacagcgtcagcatctcgtgtggcaacaagatcattcgcagcttcagggccaaagtgagcaattgaaaggcagtattgaagacaatcttgccgatgaactgcacaccgaggtggtgggcaacagcttgctggcttcgatgggcaaacttggtcgtgacaacatgtacttgttgtcacaattggaatcgcatgagattgaagcgtttgtcgatatcgaaccagactcgctattgcatcaactgcaagccgacatcctcaacttggaagagcaccaagatgacgaccatatcgagagcagccatcataaaccgctcatcgaagcgaatgatcgctctttgagcctgcacgtctgccacagcccaatgcgtgaagtggaagtgctgcacgatcaattgctggcgatgttcgatgccgatcccaccctcaagccgcgtgatattattgtgatggtggcggacatcaatgcctacagcccagcgattcaagcggtatttggcaacgcgccgggtgaacgattcatcccctattccatttcagatcgaaccgccgatcaagaaagcccgattctcaacgcgtttttgacgttggtgaatctaccacaaatgcgctgtttggcgtcagagctgttggaactgctagaaacccctgcgattttgcagaaattttccttgagtgaaacggaattcctgcaagcaaaacagtgggtggaagcgtcaggtatccgttgggggctcgatgagcaaactggatgtgagtttgagctaccgcagacaagacaaaacacctggcagtttggtattcaacgcatgttacttggctacgccatgccagaatcggctggcttgttccaaagcggtgatgaatggcttgctccttacaacgaagttcagggaatgggagcggagctggcgggcaaactgagctacttcattgaaaaggtgcgctgctatcgccacgccttagctcaagcgcaaaacattgacgcatggcgacaacaattacacggtgtcttggcggatttcttcgccgtcgacttagaaggcgaagtggcattgaaatcgattcgcgatacgttgggacagttaaaagaacagttgagtgatgcggcatttgaggcggaattgtcaccgagtgtgattcgtcaatatctactcaataaactgtccggtagccgtgtaagccagcgttttcttgccggacaagtgaatttttgtaccttgatgccgatgcgttcgattccatttcgcaccgtctgtttattagggatgaacgatggcgtctatccacgcagtgtggcaccggaaggattcgatttaattcatggccgtgccagagcgggtgatcgctctcgccgcgacgatgaccgctacttgttccttgaggccctgttgtctgcgcagcaaagtgtttacatcagctatgtcggacgttcagtgcaagacaacacagagaaagtgccgtcggtgctggtggctgaattgatggagtattgtcagcaaaactactgtttagcgggggatgagcatctgggtgtggatgaatccggtgcgcacctattaaaggcgatcacttgcgagcatcccatggtgccatttagccccatagcttttttaggtgaacctccgagcaacgcgaaaagctatgccaaagagtggattccagcggcccagcagcagagcgaaggccaagtgccgtcgcagcaaagtgcgccattttatcaagcccttgacgattatttactgggtgccacgttcccgcttgaactggatttggttgaactgcaacgtttctggcgactgccagtgcagtacttcttcaatcgccgtttgaaagtcgttttcgagccgccaatggccgtgatggccgatgaagagccgtttgtgttggatgggctcaacagcttccaattgcgtgaacagttgttgcatcgtctcttatcggatgaaaactgcacgcctgacatggtacagccgctgattgagggcgtacgcagtgaaatgcgtgctcagggcaagttgccgatcggcgcctttggtgagttggaatttgacaccaaccgcgtgcaagctgaagcgttaatggaaaaactaaccgggctatctcacgcttgtttggatgatctcgaagtggatctggcttttacgccatttggtgaaggcaaaacgattcatttgagcggttggttaacgcagcactatcaatcgggtctattacgttatcgcagtggcaaaattcgctcacaagattacttagcaggttggattgatcatctttcgatgtcggccatgggcgttgccaaagtgacgcatttgattggctacgacaagaaagaaggggttgtgcacctcaaatacccagcgatggcggatgctggccaagccaaatccttgcttaacgaattgatccgcctgtatatcgaaggcatgacccagcctttggcatatttccctaaaaccgcgttggcggccatcgaagctggcataagccgcgggcaatggaacgatgatgaagagaaagcgttgaaaaaaatggcggataccttcaatgatggtttcttgggcgcaggggaaggcgctgacagctacatcagtcgtatttggccaaaatggaatgaacaactggcccatcaagtacgtttgatgagtagtttggtgctgcaaggggcaagattatctgttgtggatgcgtcagaggaagcataa

SEQ ID NO: 157189 - protein, 1162 aa, Vibrio vulnificus YJ016
MFTVYHSNQVDVLKSLLVELIRLNPLQNPFDKEQILVQSPGMSQWLKMELAKEFGVAANIEFPLPATFIWDMFTHVLADVPKRSAFNKEAMTWKLMHLLPQQLALAEFSPLARYLQDDEEGAKLYQLSEKIADIFDGYLVYRPEWIRDWEAGKAVAEIGDEHPWQPMLWQALYDHTVALGQSPYHRANLYEHFIDSLENYTGQFERLPQRLFVFGITSLPPRYMDALKALGQHIDVHLMFTNPCRYYWGEVRDRKFLARLAAKQRQHLVWQQDHSQLQGQSEQLKGSIEDNLADELHTEVVGNSLLASMGKLGRDNMYLLSQLESHEIEAFVDIEPDSLLHQLQADILNLEEHQDDDHIESSHHKPLIEANDRSLSLHVCHSPMREVEVLHDQLLAMFDADPTLKPRDIIVMVADINAYSPAIQAVFGNAPGERFIPYSISDRTADQESPILNAFLTLVNLPQMRCLASELLELLETPAILQKFSLSETEFLQAKQWVEASGIRWGLDEQTGCEFELPQTRQNTWQFGIQRMLLGYAMPESAGLFQSGDEWLAPYNEVQGMGAELAGKLSYFIEKVRCYRHALAQAQNIDAWRQQLHGVLADFFAVDLEGEVALKSIRDTLGQLKEQLSDAAFEAELSPSVIRQYLLNKLSGSRVSQRFLAGQVNFCTLMPMRSIPFRTVCLLGMNDGVYPRSVAPEGFDLIHGRARAGDRSRRDDDRYLFLEALLSAQQSVYISYVGRSVQDNTEKVPSVLVAELMEYCQQNYCLAGDEHLGVDESGAHLLKAITCEHPMVPFSPIAFLGEPPSNAKSYAKEWIPAAQQQSEGQVPSQQSAPFYQALDDYLLGATFPLELDLVELQRFWRLPVQYFFNRRLKVVFEPPMAVMADEEPFVLDGLNSFQLREQLLHRLLSDENCTPDMVQPLIEGVRSEMRAQGKLPIGAFGELEFDTNRVQAEALMEKLTGLSHACLDDLEVDLAFTPFGEGKTIHLSGWLTQHYQSGLLRYRSGKIRSQDYLAGWIDHLSMSAMGVAKVTHLIGYDKKEGVVHLKYPAMADAGQAKSLLNELIRLYIEGMTQPLAYFPKTALAAIEAGISRGQWNDDEEKALKKMADTFNDGFLGAGEGADSYISRIWPKWNEQLAHQVRLMSSLVLQGARLSVVDASEEA

SEQ ID NO: 157190 - DNA, 3195 bp, Geobacter sulfurreducens PCA
  CDS (31)..(3195): transl_table=11
ttgcccctgaccatctacacgagcaaccggatggaggccctggtcgagcagctttgcgccgtggtcgagccccccctgtcgtcaccctttgttcccgagaccatcgtggtgcagagccggggcatggaacggtggctcgccatggagctggcaaagcgcctggggatctgggcgaacggctcctatccctttcccaatgcctttgtctggtcgctcttccgggcggcgctgccccatctgccggaccagtccccctttgaccccgccatcctgacttggcggatcatggacctgctgccgcgcctgctcccggaaccggccttcggccagttgcgggggtatctggccggggaggaccgggaactgcggctctaccagcttgcggccaggatcgccgacacctttgaccagtacaccgtgttccggggcgacctgctggcgacctgggaaacggggcgggaccagcagtggcaggcccggctctggcgcgcattgaccgcggacagccccggtacccaccggggggccgtgcgcgacgcatttctgaaacagctggccggggggcgtctccctgccggcgtctgccccgaacgggtgtcggtcttcggcatctcgtaccttccgccgttccacctggagatcttcacctccctggcccggctctgcccggtgaacctgttcgtcctgagcccctgccgggaatactggggggatatcgtctcgcccggcgcccgggcgcggatgaccccggagcgccggcagcaggccgtggaggggcatccgctgcttgcctccctgggcaagccggggcgcgatttctcgtccctcatcctggcctgcgacgacttgtcgggcggcgagcgcgacctctatgccgacgcccccggcgaaacgctcctggcagcggtgcagaacggcatccttaccctggacgaggccgacggcactccgcgcctggtccgggtggaccccggcgaccgctcgatcgggattcattcctgtcacggccccatgcgcgaggcggaggtgctccacgacgtcctgctggccatgttcgaggacctgcccggcctcacgccccgggatatcctcgtgatgacgccggacatcgagacctatgccccctatgttgccgcggtgttcggcggcggtcaggaccagcggcggcgcatcccgttttccattgccgaccggagcatcaggagtgcggggggagcggccgacgccttcctggccatcctcgatctccccctgggccgcttcccggcgaccggtgtgctggacatcctggagaccggcgcggtccaccgccgtttcggcatcgacgaggccggtctcgaacagatccgctcctgggttgaggccacccgcatccgttggggcatggacgagaacgagcgccgggctgccgggctgcctgcctaccgggagaacagctggcaggcggggctcgaccggctgctgctgggggtggccatgcccgacgaggaaggggccatgttcggcggcatcctcccccacgatgccatggaaggggacgggccggtgctcctggggcgcttcatccgcttcgtggaggccctggagcgggtgcggcaggatctggcgcgcccccgctcccttgaggggtggacagcgaccctgcgcggcatcctggccgacttcttcaatcccgatgacgccaccgccttcgaacgtgccgccttgggcaggatcgtggacggcctcggcgaactcggcgcgggctccggcttcacggacgaggtggggcggtccgtgatcagggcctggctcggcgaacggctcgacaggcccgaccaggggctcggcttcatgaccggcggggtcaccttctgcgccatgctccccatgcggagcatccctttccgggtgatctgcctgctgggggtgaacgacgactccttcccccgccgggaccgcgccgccggcttcgacctgatggccgcagaccgccgtcccggcgaccggtccctgcgggaggaggaccgctacctctttctggaagccctcctctcggcccgggagcgcctggtgatcagctacaccggtcagagcgtccgggataacgccgagcttcccccgtcggtgctggtgagcgagttcctcgactacctgggatcgcgcttcacggacggcaccgaccggttcccggcctccctggtgacacggcaccggctccagcccttcagccccgcctacttcaccggtgacggcgggctgttcagttacgcggccgaagagtgtcgcgccctgtcccgtcgcggcagggacgacgcaccgcgccccttcctggagcaccccctggccgagtccggtccggcgtcggccgacgaaacggagatcctgcccctggcgcagctcatctcctttttcgagcacccggtgcgctacctcatgcgtcaccggctcggcatccgcctggaggagagccgctcccccctggaggaccgggagccctttgccctggactctctggatgccttcctgctggaacaggagatcctggaccacattctggcgggcggcgacccggccgacctcctccccgtggcccgggcccggggcggcctgcccccggcgcgccagggagagctggcctttgcggggctcaccgcccgggtgcgggacctggccgaccgggtccggccggcaaccaacggccagccccccctcgaacccctgaccgtggacctgcgggtgggtgagcggcggctcgtgggcgagctgggttccctctggcccgccggccttatccgctggcgctgtgccaggctgtccggccgcgaccacatccggctctggattgagcacctggttttcaatgccctggcattgcccgccaccggggcggcaagcaggctcctggccgctgacggcgacctggcgctccgtcccgtggccgatccccttgcgcacctggaggctctggtgtcgtactacgggcaggggagccgggagccgctgcggttcttcccgcgcagctccctggcctttgcccgcacgggcgagatggcggcggcccgcaccacctgggggggagacttctacccagagggggacgatccctactatgcgctctgcttcggcactgccgatcccctggacgacgccttccgcgagacgtccgtcgcaatcctgacccccctgctggcccaccgggaggacgagcggtga

SEQ ID NO: 157191 - protein, 1054 aa, Geobacter sulfurreducens PCA
MEALVEQLCAVVEPPLSSPFVPETIVVQSRGMERWLAMELAKRLGIWANGSYPFPNAFVWSLFRAALPHLPDQSPFDPAILTWRIMDLLPRLLPEPAFGQLRGYLAGEDRELRLYQLAARIADTFDQYTVFRGDLLATWETGRDQQWQARLWRALTADSPGTHRGAVRDAFLKQLAGGRLPAGVCPERVSVFGISYLPPFHLEIFTSLARLCPVNLFVLSPCREYWGDIVSPGARARMTPERRQQAVEGHPLLASLGKPGRDFSSLILACDDLSGGERDLYADAPGETLLAAVQNGILTLDEADGTPRLVRVDPGDRSIGIHSCHGPMREAEVLHDVLLAMFEDLPGLTPRDILVMTPDIETYAPYVAAVFGGGQDQRRRIPFSIADRSIRSAGGAADAFLAILDLPLGRFPATGVLDILETGAVHRRFGIDEAGLEQIRSWVEATRIRWGMDENERRAAGLPAYRENSWQAGLDRLLLGVAMPDEEGAMFGGILPHDAMEGDGPVLLGRFIRFVEALERVRQDLARPRSLEGWTATLRGILADFFNPDDATAFERAALGRIVDGLGELGAGSGFTDEVGRSVIRAWLGERLDRPDQGLGFMTGGVTFCAMLPMRSIPFRVICLLGVNDDSFPRRDRAAGFDLMAADRRPGDRSLREEDRYLFLEALLSARERLVISYTGQSVRDNAELPPSVLVSEFLDYLGSRFTDGTDRFPASLVTRHRLQPFSPAYFTGDGGLFSYAAEECRALSRRGRDDAPRPFLEHPLAESGPASADETEILPLAQLISFFEHPVRYLMRHRLGIRLEESRSPLEDREPFALDSLDAFLLEQEILDHILAGGDPADLLPVARARGGLPPARQGELAFAGLTARVRDLADRVRPATNGQPPLEPLTVDLRVGERRLVGELGSLWPAGLIRWRCARLSGRDHIRLWIEHLVFNALALPATGAASRLLAADGDLALRPVADPLAHLEALVSYYGQGSREPLRFFPRSSLAFARTGEMAAARTTWGGDFYPEGDDPYYALCFGTADPLDDAFRETSVAILTPLLAHREDER

SEQ ID NO: 157192 - DNA, 3291 bp, Mycobacterium avium subsp. paratuberculosis K-10
  CDS (1)..(3291): transl_table=11
atgccgcttcacctgcaccgtgccgagcgcaccgatctgctggccgacggtctcggcgcgctgttggccaatccaccggccgacccgttcgccctcgagctcgtcgtggtgcccgcgcgtggggtggagcgctggctgagtcaacggctgtcgcatgtgctgggccgcgcccgcgacggggacggggtctgcgccggcgtgcaattccgcagtcccggctcgctgatcgccgagatcaccggcacggccgacgacgatccctggtcgccggacgccctggcctggccgctgctggaggcgatcgactgttcgctggacgagccgtggtgccgcacgctggcgacgcacctgggccacttcgacaccggcgccgaggccgagctgcgccgcacccgccgctacgaggcggcgcgccggctggccgggctgttcgccggctacgcccggcaacggccgcggctgctggtcgactggctcgacggcgacccgggcgatctggacgaggacctgcgctggcaaccgccgctgtggcgggcgctgttggcccgggtggccgccgatccaccgcacgttcggcacgccgaaaccatcgcccggctgcggcgggcgcccagcgacctgccgcagcggctgtcgctgttcgggcacacccggttggcgtgcaccgacgtggagctcctggacgcgctggccactcaccacgacttgcacctgtggctgccgcacccgagcgaccggttgtggcgcgcgctggccggcacgcacggcgtgatcccccggcgcgacgacaccagccaccgcgccgtcgcccacccgctgctggccacgctgggacgggatctgcgcgaactgcagcgcggcctgccggcggatccgcggaccgacgagtacctggccggcgacgcccgccccgacacgctgctgggctggctgcagtccgacatcgccgccaatgccgttcgcccggttggccgctcgctggccgccggggaccgctcggtgcagatccacaactgccacgggccggcccgccaggtcgacgtgctgcgcgagatgctgctgggcctgctcgccgacgacccgacgctgcagccgcgcgacatcctggtgatgtgccccgacatcgaaagctacgcgccgctgatcatggccgacttcggcctcggcgacgtggtgcacggcgcgcaccccgcccaccagctgcgggtgcggctggcggaccgttccctgatccagaccaacccgctgctcggggtggccgcgcagctgctggccctagccggcggccgggtgcgggccagcgaggtgctcaacctggcccagacgccggcggtgcgcgcccggttcggcttcaccgacgacgatctggacaccatcaccggatgggtccgccaggccaacatccgctgggggctggaccggcagcatcggcggccctaccacgtcgacttcgtgcacaacacctggcgtttcggcatcgaccggatactggccggcgtcgcgatgtccgacgactcgaacgcgtggatcgacgcgacgctgccgctcgacgacgtcagcagcaatcgtgtccaattggccggccagctcgcggaattcgtcgcccggctgcagcacgtcctggactcgctcaccggtgcccggccgctgaccgactggctcaccgccgtcgccgacggcatcgccctgctgacccgggtgcgcgatgccgacgaatggcagagcggtcagctgcagcgcgagttcgccgcggtgtccgcgcaggccggatcccgcgccgacaccgtgctgcggctgcccgacgtccgcgcgctgctgacccggcacctgtccggacgtccgacccgcgcgaatttccgcaccggcacgctgacggtgtgcaccatggtgccgatgcgttcggtaccgcaccgggtggtgtgcctggtcggcctggacgacgggctgttcccgcggctcggtgtcgtcgacggtgacgacgcactggcgcgctgcccgatgaccggggagcgcgacatccgttccgaggaccggcaattgctgctcgacgcgatcggcgcggccaccgagaagctggtgatcacctacaccggcgccaacgagtattcgggtcagccacgcccgccggcggtgccgctggccgaactgctggacaccctcgacataaccaccgccgagccggtgcgcgaccgcatcgtcgtgcgacatccgttgcagccgttcgacattcgcaacatcatccccggcgagctggtgcccggggtgccgttcagtttcgaccccacggtgctgcgcgcggcgcacgcggccaccggcgaacactgcgagccaccgaagttcatctccgcgccgctgccgcccccgccgcccgctgacgtgatcctggccgatttggtcggcttcttcaaagacccggtgcaggggttctttcgggccctgcagttcacgctgccccacgacgtcgacggagtgcaggacgcgatgccggtggacatcgacgccctacaggagtggacggtcggcgatcgcatgctgcgcgacatgctgcgcgggatgaccccggaggacgctcggcaggccgagtggcgccgcggcaccctgccgccggggcagctgggctggcgcagggtgaccgagatccgcgaccaggcagcgcgattggcattggaggcgcaccagcaccgggccgagcagccgggcggcgcccacgacgtcgacatcgatctgggccgcgggcgccggctcaccggcacggtgaccccggtctacggcgaccgcctggtcgcggtgacctattcgcggctggacggcaggcatctgctcgagtcgtggattccgttgctggcgttggccgctcacgatcgcggccgcgactggtcggcggtgtgcatcgggcggatgcgccggggcaccggcatccgggtgcagcggctcgggtcgccggacgacgatcccgtcgagctgctgcgcgagctggtgagcatttacgacgccgggcggcgcgagccgattccgttgccgctcaagacctcctacgcgtgggcggccgcccgctacggcggcgacgacccggtggccgaggcgcgctaccggtggaagtccagcgaccgctaccccggggaggaccaggcgccggcgcatgtgcgggcctggggacgcggtgcgccgctggacgacctgatgcggccggtgcgcccgggcgaggagtgcgacggcgaggacaaccggctcggcgcctacgcggcccggctgtggctgccgatgttgcgggccgagcggacgacggcgtga

SEQ ID NO: 157193 - protein, 1096 aa, Mycobacterium avium subsp. paratuberculosis K-10
MPLHLHRAERTDLLADGLGALLANPPADPFALELVVVPARGVERWLSQRLSHVLGRARDGDGVCAGVQFRSPGSLIAEITGTADDDPWSPDALAWPLLEAIDCSLDEPWCRTLATHLGHFDTGAEAELRRTRRYEAARRLAGLFAGYARQRPRLLVDWLDGDPGDLDEDLRWQPPLWRALLARVAADPPHVRHAETIARLRRAPSDLPQRLSLFGHTRLACTDVELLDALATHHDLHLWLPHPSDRLWRALAGTHGVIPRRDDTSHRAVAHPLLATLGRDLRELQRGLPADPRTDEYLAGDARPDTLLGWLQSDIAANAVRPVGRSLAAGDRSVQIHNCHGPARQVDVLREMLLGLLADDPTLQPRDILVMCPDIESYAPLIMADFGLGDVVHGAHPAHQLRVRLADRSLIQTNPLLGVAAQLLALAGGRVRASEVLNLAQTPAVRARFGFTDDDLDTITGWVRQANIRWGLDRQHRRPYHVDFVHNTWRFGIDRILAGVAMSDDSNAWIDATLPLDDVSSNRVQLAGQLAEFVARLQHVLDSLTGARPLTDWLTAVADGIALLTRVRDADEWQSGQLQREFAAVSAQAGSRADTVLRLPDVRALLTRHLSGRPTRANFRTGTLTVCTMVPMRSVPHRVVCLVGLDDGLFPRLGVVDGDDALARCPMTGERDIRSEDRQLLLDAIGAATEKLVITYTGANEYSGQPRPPAVPLAELLDTLDITTAEPVRDRIVVRHPLQPFDIRNIIPGELVPGVPFSFDPTVLRAAHAATGEHCEPPKFISAPLPPPPPADVILADLVGFFKDPVQGFFRALQFTLPHDVDGVQDAMPVDIDALQEWTVGDRMLRDMLRGMTPEDARQAEWRRGTLPPGQLGWRRVTEIRDQAARLALEAHQHRAEQPGGAHDVDIDLGRGRRLTGTVTPVYGDRLVAVTYSRLDGRHLLESWIPLLALAAHDRGRDWSAVCIGRMRRGTGIRVQRLGSPDDDPVELLRELVSIYDAGRREPIPLPLKTSYAWAAARYGGDDPVAEARYRWKSSDRYPGEDQAPAHVRAWGRGAPLDDLMRPVRPGEECDGEDNRLGAYAARLWLPMLRAERTTA

SEQ ID NO: 157194 - DNA, 3312 bp, Prochlorococcus marinus str. MIT 9303
  CDS (1)..(3312): transl_table=11
ttgctgacgatctaccgcagcaacagagcggagtggttagctcgagtgttggcggagcagctgcgtctggcaccaccaggtctatttgactcagtggatgtcgtggtgaacacctggcccacaagccgctggctgggggaacagttggcaagcgtgaatggcatcagtgctttggtgcgattcccctttccaggatcacgcttacggcagttggttcggatgatcttggggatcgatagtgatgctgaagatccttggcgggccagtcgactcgtttggcctctgcttgatttgttgccacagcttttggagactgaagaagctgcgccattgagagaatgggtcaatcggcagccatctcggccaggccacctcaaccgagtgcaatggcagttagcgagaagcattgccgatgcctttgacgactacgcgctttaccgccccaagttgatccatcaatggctggagggcagtgatcggcttttgaactcatcgcaggagatgcctttaaccctgcgctggcaaccgctgttgttgcgtttattagctgaacgtttgaacgttgaaccgttcgggattcaggtgcatagggctgtttcaaagctgcgcaacggagaccaccccgccatggcattgccaagtcaactgcggctttttggcctgagcagtcttgctccggtgcaagttgagttgattcaggccctctcgggtcttgtggacgtacagatgtttctgctgaccccctgtccggatctttggcaacgatgtcgtagcagaagggagacgttggggaatgagtggaccgagccggctgatggtttttggttgctcgaagcgccgcgcttagaagccatccttggacgcatgggcgcggaatttcagcagttgctggaagggggcggtgagagtcagctcggccagtggcaggagggtgatctattcgctgcgccggccaccatggcttgtgaatccggacaagaacctactttgcttgagcagcttcagcagcagcttgtctcgccggatgatcatcaacctctaaggcgcaggcaagaggacagttctttgcagtttttggcttgccctgggcaatggcgccaggtgcagttggtccgcgatcagatcttgcaatggtttgctgccgatcccagcctcgaaccccgtgatgtgttggtgatgaccccacaggtcaatcgttttgctcctctgctcgcctcggtgttcaacgatgctgcagccactggtgtggagcttccctggcggctcacagatcgcagccagcaggacagccctgggctgacgcaggggatgttgcaactgcttcagatcgcaggcgagcgattgactgccaccgctcttgaaggcttgctcgctaatccggcaatacagcagcagcaaggcttcagccaggacgatgccagtagcctcagtcgctgtttgcaacgcacaggatttcgctggggccttgatgccgaggagcggggtggtgatgagacccatagcctcatctggtgcttggatcgctggctgcttggcttggtgttgcccagcacaccaggcctggctcctgggggagcagcaccctttgcagaggggctggaaccagcccagcttgcgaagtggtggcagcttttagctcagttcagccggcagctgaaagagtttcgtcgtgctcgaacttgtggcgcttgggtagagcttctacagggttttgtcgaggagttgtttggtgatggtggctcttgggcctgggagcggcagtgcctgctgatcgctttggaggattggcgtcagattggtgctgactgcacgttgttgctggaagcggctgttgtagcagatgtgttgaatgaagctctctctgcagatagcggtcggtttggacatcgcactggtgccctcacagtgagtgctctggagccgatgcgtgccatccctcatcgtgtgatcgtgctgatgggattggacgccgatgttttccctcgccatcgcgagcgagctggctttcatctattggagcagcagcgtcagctaggtgatccacgcagtagtgatcaagatcgttatgtgcttttggaagcattgatgtcgacccgacagcatctgctgatcacctggaacagccgcgatgagcacacgggcgaatgtcgcccagctgctagccctgtgcagcaatggcttggacggctgcagcatgagctcagcgatgagacgttccagggcctatgtcgagaaccagccgccaatccccttgagcgcagtaattttctatctcaggggagccaaccgcctcctagctgtgaccgtcgccatttcgaggcgcgccgctggttggataaaactctggcgccaccaccccttgcccttgcgctgcctttgcattggagttcggtgtcattggaggcttctgcggttatctcatctgaattgttgttgcgctggttaatcgctccccagctgatttggctggagcaatttcaggtaacaccacgtgaatggtttgatcctgttgaagatcttgaggccctcgatctagatgaatggcatcgacatggtctgctcaagcagcgcttgtcagagctgcttggccatctccctacggatgagaatgcattgttgcagggatcagaagcaggtgattggaagcatcgctatgccggtcaagggacccttccaccaggagcagctgcgacgttggagtgcgagcgtctcgaacaacgttggcagcatttacaggcaacgctactgagcatgggaccatgctcgacacgacgtcttgaattggcggatggctccaggcaaatgctctgggctggggacacggttgttgtggtgcaaccaggtcagttgaagtcaaggggggtgatggagggatggctaagccatttgcaggtctgcgcaaatcacacgcttacgtcggcaactgtcgtcgtagcccgttgtggaccagcagccaagaaggatcaatttgagatagctctgcgttggcagccacttccagccgagcaagcaagagaacaactcattgctttgcaggctttggcttgtcagggcttgagtcagtgttggccggtgccaccgatgagtggttgggcctacgccaacgccaacaacaaattggctggtaggggagaagaagccttccgtcagtcttggagtggcggatttaatgttcagggtgagcgtgaacgggctgagatgcagctctgttttggtctgaactgcgaagcttcagagcttctcaacagcgctggttttgagcaggcaaacacaagcctctatggccctttggttgaggcattggcgatctag

SEQ ID NO: 157195 - protein, 1103 aa, Prochlorococcus marinus str. MIT 9303
MLTIYRSNRAEWLARVLAEQLRLAPPGLFDSVDVVVNTWPTSRWLGEQLASVNGISALVRFPFPGSRLRQLVRMILGIDSDAEDPWRASRLVWPLLDLLPQLLETEEAAPLREWVNRQPSRPGHLNRVQWQLARSIADAFDDYALYRPKLIHQWLEGSDRLLNSSQEMPLTLRWQPLLLRLLAERLNVEPFGIQVHRAVSKLRNGDHPAMALPSQLRLFGLSSLAPVQVELIQALSGLVDVQMFLLTPCPDLWQRCRSRRETLGNEWTEPADGFWLLEAPRLEAILGRMGAEFQQLLEGGGESQLGQWQEGDLFAAPATMACESGQEPTLLEQLQQQLVSPDDHQPLRRRQEDSSLQFLACPGQWRQVQLVRDQILQWFAADPSLEPRDVLVMTPQVNRFAPLLASVFNDAAATGVELPWRLTDRSQQDSPGLTQGMLQLLQIAGERLTATALEGLLANPAIQQQQGFSQDDASSLSRCLQRTGFRWGLDAEERGGDETHSLIWCLDRWLLGLVLPSTPGLAPGGAAPFAEGLEPAQLAKWWQLLAQFSRQLKEFRRARTCGAWVELLQGFVEELFGDGGSWAWERQCLLIALEDWRQIGADCTLLLEAAVVADVLNEALSADSGRFGHRTGALTVSALEPMRAIPHRVIVLMGLDADVFPRHRERAGFHLLEQQRQLGDPRSSDQDRYVLLEALMSTRQHLLITWNSRDEHTGECRPAASPVQQWLGRLQHELSDETFQGLCREPAANPLERSNFLSQGSQPPPSCDRRHFEARRWLDKTLAPPPLALALPLHWSSVSLEASAVISSELLLRWLIAPQLIWLEQFQVTPREWFDPVEDLEALDLDEWHRHGLLKQRLSELLGHLPTDENALLQGSEAGDWKHRYAGQGTLPPGAAATLECERLEQRWQHLQATLLSMGPCSTRRLELADGSRQMLWAGDTVVVVQPGQLKSRGVMEGWLSHLQVCANHTLTSATVVVARCGPAAKKDQFEIALRWQPLPAEQAREQLIALQALACQGLSQCWPVPPMSGWAYANANNKLAGRGEEAFRQSWSGGFNVQGERERAEMQLCFGLNCEASELLNSAGFEQANTSLYGPLVEALAI

SEQ ID NO: 157196 - DNA, 3243 bp, Mycobacterium sp. JLS
  CDS (1)..(3243): transl_table=11
atgccattccatctgcaccgggcggagcgcaccgacctcctggccgacggactcggtgccctgctgtccactcccctggccgacccgttcgccgaggagctcgtgctcgtcccggcgaagggcgtcgagcggtggctgagccagcggctctcgcacgtcctcggccgcggttccggcgacgacggggtctgcgcgggcatcacattccgcaatccgcggtccctaatcgccgacattaccggcacccgggacgacgacccctgggcccccgactcgctggtctggccgctgctcgaggtcatcgacgacaacctcgaccaaccgtggtgcaccacgctcgccacccacctcggccatttcgaacacggcgaggagcaggagctccgccagagccgccgctacgccgtcgcccgccgtctcgccggcctgttcgcctcctacgcccgccagcgccccggactcctcgtcgactggctcgccggcgaccccgcagacctcgacgacgacctgcactggcagccgcatctctggcgacacctcgtcgaccgcgtacccgccgacccaccgcacatccggcacgccaaaaccgttgcccgccttcatgagtcacccagcgacctgcccgaacggctgtcgctgttcggccacacccggctgccctccaccgaggtcgaactgctcgacgcgctcgccacccaccacgatctgcacctgtggctgccgcaccccagcgacgacctgtggaccaccctcgaaccccaccgcggcgccgtgcgccgccgcgaggacaacacccaccgcgaggtcggccacccgctgctcgccaccctcggccgcgacctgcgcgaactgcagcgcagcctgcccgacgacgcgcagaccgacgagtatctgggcaccgccgaccaccccgacaccctgctcggctggctgcagtccgacatcgccgccaacgcggtccgccccgacggccgccgactgcacgaccacgaccgctcggtccaggtgcacagctgtcacggcgccgcccgccagatcgacgtcctgcgcgaggtgctgctcggcctgctggtcgacgacccgactctcgaaccccgcgacatccttgtcatgtgcccggacatcgagcactacgcaccgctgatcgtcgccggcttcggcctcggcgacgtgatccacggtgcgcacccggcccatcggttgcgcgtcaaactcgccgaccgcgcgctcacccagaccaacccgttgctgggcgtcgccgcccaactcctcgcgctcgccggcggccgcgccaccgccaccgaggtgctcaacctcgccgaggccccgtcgatccgggcgcggttcaccttcagcgacgacgacctcgacgcgatcggcgactgggtacgcgaggccaacatccggtgggggttcgaccgcgagcaccgccacccctacggcgtcgacttcgtccagaacacctggcgtttcggactcgaccgggtgctcgccggcgtcgccatgtccgacgactcgcacgcctggctcgacaccacgctgcccctcgacgacgtcggcagcgaccgcgtcgaactcgccggccgcctcgccgaatacgtcgaccgactgcagcattgcgtcgaaaacctcagcggcacaaggccactccatgaatggctcgatgcgctgcgcaccggtatcgaccagctgaccagcgttccagacgacgacacctggcagaccagccaactggagcgcgagttcgccgacgtcctcacccaggccggcccccgcaaagacaccctgctgcgcctgcccgacgtcaaggccctgctcgaccgccacctcgccggacggcccacccgggccaacttccgcaccggcacgttgacggtgtgcacgatggtgccgatgcgttcggtcccgcaccgggtggtgtgcctggtgggtctcgacgacggggcgttcccgcgcctgggcgtggtcgacggcgacgacgcactggcccgcgacccgatgaccggtgaacgcgacatccgctcggaggaccgccaactgctgctcgacgcgatcggcgcggcgacggagaggcttgtcgtcacctacaccggcgccaacgagtactccgggcagcgcaaacccccggcggtgccgctggtcgaattgctcgacgcactcgacgtcaccaccgaggccccggtccgcgagcagatcctcgtcgaacatccgttgcagcccttcgacgttcgcaacgtcaccccgggcgcactcggcgtacccggcacaccgttcacgttcgactcgacggcgctgaccgccgcgaccgtcgcgtccggggaccgcgccgagcggccgggtctgctcacccacccgctgcccgcgcctccggaggacgacgtcgcgctcgacgacctgatcggcttcttcaaggatccggtcagggggttcttccgggcgctggacttcacgctgccgtgggacgtcgacgccgtcgaggacgccatgccggtggagatcgacgcgctggccgaatggcaggtcggtgaacggatgctcgatgacatgctgcgcggcctcaatcccgaacaggcccaacaggcggagtggcggcgcggttcgctgccgcccggccgactcggctggcgcaaggcgcaggagttgcgcgatcaggccgccgcgctggccaccgcggcgcaccggcaccgacggcaaccgccccgggcgtatgacgtcgacatccacctcggtggcggccgccgcgtcaccggcacggtcccgaaggtgtacggcgaccgcacggtcaccgtcacgtactccaaactcgacggccgccacctgctggcgtcgtggatccagttggcggcgttgagcgctcaaatgcccggtacggactgggcggcggtgtgcatcggccgcccgaagcggggcaccaccccgcgggaacggatgctcggcgcgcccggggatgccgccggcgtgctgcaggatctggtgaacatgtacgacgcggggcggcgtgagccgattccgttgccgccgaagacgtcctatgcgtgggccgaggcgcgtcacagtcgtggagacgcggagcgggaggcgcggtaccgctggaagtcggaccgctacccgggtgaggacgccgaaccggccaacgtacgggtgtggggggcgcacgccccgctggacaccctgctcgcggcgggcatggacggctacgccggacgcctgtggctgccgatgctggaagccgagagggactga

SEQ ID NO: 157197 - protein, 1080 aa, Mycobacterium sp. JLS
MPFHLHRAERTDLLADGLGALLSTPLADPFAEELVLVPAKGVERWLSQRLSHVLGRGSGDDGVCAGITFRNPRSLIADITGTRDDDPWAPDSLVWPLLEVIDDNLDQPWCTTLATHLGHFEHGEEQELRQSRRYAVARRLAGLFASYARQRPGLLVDWLAGDPADLDDDLHWQPHLWRHLVDRVPADPPHIRHAKTVARLHESPSDLPERLSLFGHTRLPSTEVELLDALATHHDLHLWLPHPSDDLWTTLEPHRGAVRRREDNTHREVGHPLLATLGRDLRELQRSLPDDAQTDEYLGTADHPDTLLGWLQSDIAANAVRPDGRRLHDHDRSVQVHSCHGAARQIDVLREVLLGLLVDDPTLEPRDILVMCPDIEHYAPLIVAGFGLGDVIHGAHPAHRLRVKLADRALTQTNPLLGVAAQLLALAGGRATATEVLNLAEAPSIRARFTFSDDDLDAIGDWVREANIRWGFDREHRHPYGVDFVQNTWRFGLDRVLAGVAMSDDSHAWLDTTLPLDDVGSDRVELAGRLAEYVDRLQHCVENLSGTRPLHEWLDALRTGIDQLTSVPDDDTWQTSQLEREFADVLTQAGPRKDTLLRLPDVKALLDRHLAGRPTRANFRTGTLTVCTMVPMRSVPHRVVCLVGLDDGAFPRLGVVDGDDALARDPMTGERDIRSEDRQLLLDAIGAATERLVVTYTGANEYSGQRKPPAVPLVELLDALDVTTEAPVREQILVEHPLQPFDVRNVTPGALGVPGTPFTFDSTALTAATVASGDRAERPGLLTHPLPAPPEDDVALDDLIGFFKDPVRGFFRALDFTLPWDVDAVEDAMPVEIDALAEWQVGERMLDDMLRGLNPEQAQQAEWRRGSLPPGRLGWRKAQELRDQAAALATAAHRHRRQPPRAYDVDIHLGGGRRVTGTVPKVYGDRTVTVTYSKLDGRHLLASWIQLAALSAQMPGTDWAAVCIGRPKRGTTPRERMLGAPGDAAGVLQDLVNMYDAGRREPIPLPPKTSYAWAEARHSRGDAEREARYRWKSDRYPGEDAEPANVRVWGAHAPLDTLLAAGMDGYAGRLWLPMLEAERD

SEQ ID NO: 157198 - DNA, 3630 bp, Burkholderia vietnamiensis G4
  CDS (1)..(3630): transl_table=11
atgtcgaatatcatttccccggcgctgatgctgatccacgggaatcgatccgagcagcttcgcgacctgctcgtcgaatggatcaagcactatccactcgccccgctcgagagtgagacgattctcgtccagagtaacggcatcgcgcaatggctgaagctcgcgctggccgccgaccgcgatccagcaactggcgagggcggctgcgggatcgccgccgcgctcgacgtttcgttgccgtcgcgcttcgtgtggcaggcgtatcgcgccgtgctcggtgcagaatcggttgcggaagtgtcgccgttcgacaagtcgcgactcgtctggcgcctgatgcgtatgttgcccgcgctggcagcccggccggcgttcgagccgctcaggcgcttcatcagcgacgacgacgatcggcgcaagcggttccagctcgccgagcgccttgccgacctgttcgaccagtaccagatgtatcgcgccgactggctggcgcgttgggcggacggcgacgcggtcgtgctcgatgcacgcggcggcgagcagccgttgcccgacgagcagcgctggcaggccgcgctgtggcacgaactggtggccgacgtggcgggcagcgacgcgtcccgggagatttcgtcgagaggcgggcgggctgcggtgcacgaagcgttcatgcgccggatcgccgcctgggacgacgaccgcgggccggtgggcattccgcggcgcatcgtgatcttcggcatttcgagcctgccgcaccagttgctggaagcgctggccgcactcgcgcgctggagccaagtgatgatgtgcgtggccaatccatgcgcccactactgggccgacatcgtgccagaccgcgacctgctgggccggcgtcagccgcgtcagcaacggcgaaccgggatgcccgccgaactcgacctcgacacgctccacttgcacgcccatccgcttctggcgtcgtggggcaagcaggggcgcgacttcatcggcctgctcgacgcgttcgacaacgccgatgcgcgcgagcattacggtccgaaattcgcgcgcatcggccagcgcatcgacctgttcgagtcgcgcggcgcatcgacgctgctgcagcagttgcaggacgatatccgcgatctgcgtccgctgcgcgagacgcaggagacgtggccggacgtcgatccggcgacggacggatcgattcgctttcacgtcgcgcacagcgcgcagcgcgaagtcgaaatcctgcacgaccagctgctcgcggcattcaacgcggacccgagcctgcggccgcaggacgtcgtcgtcgtggtgccagacatcgaagcctacgcgccgcacgtgcaggccgtcttcggcctggtcgaccggagcgacccgcgctacatcccgttcagcgtggccgaccgcgaacagcgcaaagccgatccgctcatcggtgcactcgagatgctgctcggcttgccgaacgcgcgccttgccgtcagcgatctgctcgatctgctcgacgtgccggcgctgcgcaagcgcttcggtatcgacgaaaccgacctgccaaagctgcgtgcgtggatccgcggcgcaaacatccgatggggtttgcacgcgcagcagcgcgcgagcctcggcttgccgctcgacgagcatgccgccgcgccccatacctgggcgttcggcctgcggcggatgctgctcggttatgccgtcggcagcgaggcgggcgcctggcacgacatcgaaccgttcgacgaggtgggcggactcgacgcggcgctgctcggcccgctggtccggctgatcgatgcgctcgaccacgcgtggcgctcgctcgccgagcctgcgacggcgccggactggtgcgagcggctgcggaatctgaagcagacgttcttcagcgcgcacgacagtgaagacgcgtatacgctcgcgcgcctcgacaacgtgttgcaggcctggctcgacgcatgcaccgaggctcgactgaccgacgtgctgccgctgtccgtcgtcagcgatcattggctgagccagctggatgagggcgggctctcgcagcgcttcttcgccggcgcggtgacgttcgcaaccttgatgcccatgcgcgcgattccgttccgtcgcgtgtgcctgctcggcatgaacgacggggactatccgcgtgcgcgcgtgccgatggatttcgacctgatgcgactgcattaccggccgggcgaccggtcgcgccgcgaggacgaccggtatctcctgctcgaggcgctgctgtcggcgcgagaccatcttcatgtgtcgtgggtcgggcgcagcattaccgataacggcgtgcgcccgccgtcggttctgatcggccagttgcgcgaccatctcgctgccgggtggcgcctcgcgggtgcgagcggtgcggggcctgacgcactcgtcaaggcgctgacggtcgagcatccgttgcaaccgttcagcgtcgcgtatttcccgcccgacacgaatgatgcggcggcggtcttcacgtatgccgccgaatggcgcgacgaaccgcgcgcgtgccgcgatcccgcgccgccggccgcgacgcacgtgccggcaatcgtccgcgacgatccattgtcgcttcgcgaactcgcggagttcctggcgaaaccggtcaagacgttttttagtcagcgactgcgcgtggcgctcgacgtcgacgagactgccgtcgacgacgaagagccgttcgagctcgattcgctcgacgcctggaaactgcaggacgagctgatcggcgtgcaggccgcgcacatgcacgacgacgacgcgctcgtggccgcacgcgacgcgcgcatggccgccatccgccggcggggcgacgtcgtgccgggcggcttcggcgatctcgcgagcgcagcattgctcgagccgatggacgaactgttcgccgcataccgcaagcaactcgcgcgatggcccgttgccatcgacggcgaatgcgaggtcgcatttcagatcgctggggaaagccgggtgcccggcctgagcgactggctcggtcaatggcgcgaggacagcgaaggccggcgtgcgcgactggtgctcgagacgagtgcgctcgtcgagaagggcgcgtaccgatatcacaagctggtcggccattgggtccggcatctggcggccaacctcgcggggcggcacgtaacgaccgtgatcgtcagcaagaagggcatcgtcgaattgcgaccgcttgccggcggcgacaccgaagcgcatctcacggcgttgctgcaggtgtgggacgcagggatgcgcgagccgctgccggtcgcggtggagtcggctttcgcatggctggtccggcgcttcggcaaggacggcaacggtgcggcgccggaggacacgcgcgcggccgccgaaaaggccgcacgttcgaaatacgcgggcgatgcgtacaacaagggcgaagttgccaagagcgcgagcctcggccgcgcatttccggatttcgatgcgctatgcgcggacggccggttcgaggcgcttgccgagtccttgctgttgccgctgttgcgcgccatcgtcagaagcgacacgaaagaaccaaagaaagacgcgaagcaggacaaggccgcacccgacgcggcgggagtcgacgaatga

SEQ ID NO: 157199 - protein, 1209 aa, Burkholderia vietnamiensis G4
MSNIISPALMLIHGNRSEQLRDLLVEWIKHYPLAPLESETILVQSNGIAQWLKLALAADRDPATGEGGCGIAAALDVSLPSRFVWQAYRAVLGAESVAEVSPFDKSRLVWRLMRMLPALAARPAFEPLRRFISDDDDRRKRFQLAERLADLFDQYQMYRADWLARWADGDAVVLDARGGEQPLPDEQRWQAALWHELVADVAGSDASREISSRGGRAAVHEAFMRRIAAWDDDRGPVGIPRRIVIFGISSLPHQLLEALAALARWSQVMMCVANPCAHYWADIVPDRDLLGRRQPRQQRRTGMPAELDLDTLHLHAHPLLASWGKQGRDFIGLLDAFDNADAREHYGPKFARIGQRIDLFESRGASTLLQQLQDDIRDLRPLRETQETWPDVDPATDGSIRFHVAHSAQREVEILHDQLLAAFNADPSLRPQDVVVVVPDIEAYAPHVQAVFGLVDRSDPRYIPFSVADREQRKADPLIGALEMLLGLPNARLAVSDLLDLLDVPALRKRFGIDETDLPKLRAWIRGANIRWGLHAQQRASLGLPLDEHAAAPHTWAFGLRRMLLGYAVGSEAGAWHDIEPFDEVGGLDAALLGPLVRLIDALDHAWRSLAEPATAPDWCERLRNLKQTFFSAHDSEDAYTLARLDNVLQAWLDACTEARLTDVLPLSVVSDHWLSQLDEGGLSQRFFAGAVTFATLMPMRAIPFRRVCLLGMNDGDYPRARVPMDFDLMRLHYRPGDRSRREDDRYLLLEALLSARDHLHVSWVGRSITDNGVRPPSVLIGQLRDHLAAGWRLAGASGAGPDALVKALTVEHPLQPFSVAYFPPDTNDAAAVFTYAAEWRDEPRACRDPAPPAATHVPAIVRDDPLSLRELAEFLAKPVKTFFSQRLRVALDVDETAVDDEEPFELDSLDAWKLQDELIGVQAAHMHDDDALVAARDARMAAIRRRGDVVPGGFGDLASAALLEPMDELFAAYRKQLARWPVAIDGECEVAFQIAGESRVPGLSDWLGQWREDSEGRRARLVLETSALVEKGAYRYHKLVGHWVRHLAANLAGRHVTTVIVSKKGIVELRPLAGGDTEAHLTALLQVWDAGMREPLPVAVESAFAWLVRRFGKDGNGAAPEDTRAAAEKAARSKYAGDAYNKGEVAKSASLGRAFPDFDALCADGRFEALAESLLLPLLRAIVRSDTKEPKKDAKQDKAAPDAAGVDE

SEQ ID NO: 157200 - DNA, 3339 bp, Burkholderia vietnamiensis G4
  CDS (1)..(3339): transl_table=11
atgctccatcttttctactcgaaccgtcacgaaacgctggccgatgcgctgctcgaggatctggccgcgttcccggcccacaacggcccgtgggcgtcgcaacaagtgatcgtgccgagcgcggcgttgcgccgccgtctcgagctcgacatcgccgcgcgccacggcgtctgcgcgaacgtcgagttcacgtatctcgcgcaatggctgtgggcgcagatcggtcgcgtgttgaccgtgcccgcgcgctcgccgttcgcgcccgatcggctcgtgtggcgctgctaccggctgtttgcgcaggctgcggacggtgcgccgtggttcgcgtcgccgcggctcgcggcgtacctgagcgcgtcggacgacgcgatgcgctatgagctggcgcagcgtgtcgcgaccgtgctcgaccactacctgacctatcggccggaatggctggcggcgtggcaggccggcgaatcggtgctcgcgggcgatgccgcaccgcgcggcatcagcgacgcggcgcgcgacgacgagcgctggcaggcggcgctgtggcgcgcgctgctcgccgagttgagcgacagcggcacgccgccggcgcatcgctttctcgtggaggcgcgcaatctcgatgccgagacggtcgaacgcgccgagtggccggaatcggtctgcgtgttcgcgctgcccacgatgccgccgctgcacgtcgcgctgctgcgcgagctgtcgcgctggatcgacgtgcgcatttacgcgctcaatccttgtcgagaattctggttcgacatcgtcacggccgcgcatgcggaggcgctcgatgcggccgggcggctcgactatcaggaggtcggccatccgctgcttgcggagtggggccgtcagacgcaggcgcagctgcacatgctgcacgagctgaccgaaagcgccgcgtcgggcgatgcgtcgcgcttcgtcgagaacgcggcgcccagctggctcgcgcgcgtgcagaacgcgattctcgggctgcagcccgaggccgagctcggcgacgcgccggccgagcgcgggatcgaggtgcacgtgtgccacagcctcgcgcgccagctcgaggtgttgcacgatcgcctgctggcatggttcgacgccgacgcgacactgcagccgtccgacgtgctggtggcggttgccgatctcgcggcggccgggccgctgatcgacgccgtgttcggcacggcgggcgccggggcggcacgcgtgccgtaccggatcaccgggctgccgccgtcgcaggcgaacccggtcgcgcgcgtgctgctcgaatggctcgcgttgccggaccggcaggtcggcgcgcccgagctggtcgaatggttgcgcgtcgacgcagtcgcagcccgttacggcatcgacgcggccgcgctggagacggtgcagacctggctcgcggccgcgggcgcgcgacgcgggctgtcgccggcggtcagcgacgatgcggcggtgcccgcaccgcgccatacgttcgccgatgcgctcgcgcgcctgttcctcggctatgcgatgcccgaaggcgccgcgccgatcggcgcatggctgccgatcgaggcggccacgggcagcgaggccgagctgctcggccggctggcccgcttcaccgacgatctcgacgggttcgcgcagcggcttgccggtgcgctcacgccgcgcgcatggagcgagctgttcgccgatacgctcgcgcgcttcttcgattcgggcgccgcgtatgccgatgcgcttgccggcgtgcgcgacgcgctcgacgcgatgcttgcggcgatgaccgaaggtgcgccggacgaggcgctgcccgctgcggtcgtgcgggccgggctggccgccgcgctcgacgatccggcgcgtggcggcgtgccgtggggcggcgtgacgttctcgtcgctgacgagcttgcgcgggctgccgtaccgcgtgatatgtctgctcgggatggacgacggcgtgctgccgagcctcgcccgtgccgacgagttcgacctgatggccgtgctgccgaagctcggcgaccggcagcgccgcgacgacgagcgcaacctgttcctcgacctgctgctcgccgcgcgcgatcggctgctgatcgcgtacaccggccgcagcatccgcgacaacgcgccgttgccgcccgcggcgctcgtcgacgaactgctcgatcacctcgcgctcgtcacggccggcgcggacgccgcgccggaggcggtcgacgccgcgcgccgcgcgttcgtcgtcgaacatccgctgcagccgttcgcggccgagtatttccggcccggcagcgaactcgcatcttacgacgccgagcgcgcgacgctggcgtcgctgctcgcggccgaagccgcacgcgatgcgtcgcgggagcagccgttcttcgcgcagccgctggcggccgagccggtcgagccggtcgcattcggcgaattcgaacggttctggcgtcatccggctcgcgcgttgttgcgcgcgcggctcggcatcgtgttgtccgacgcgcaggcggaattgctcgacaccgagccgttcgcgctcgacttcgccggcagcgacgcgctcgccgagcgcctgctgccgctgctgatcgaatccgacgagcgcgacgtgcacgatcacgcgttgcgcatcgccgacgcgagccccgaactgccgggcggcgcgacgggcgccgtgtggcgcgaccaggcgctcggctcgatgacgcagctcgcgtcgaacgtgcgtcgtgcgctcgccgaaggcgtcgcgcggcggccgttcacgctcacgatcgcgcctgcatggcccgaaaccgccgatgaactgttcggcgtgcacgacgcgatgctgtcggccgatgcggtgagcgcgccgctcgagttgcacggcacgctgaaccggctcacgccggccggtcaggtgatctatcgctacgcacgcccgagcgcgcgggattacttgtcggcgtggctggcgcacctcgtctactgcgcggtggagcccgacgggccgcgccgctcgctgtggttcggcagcggcggggcattcgagctcacgccggtcgcggctccgctcgagcggctcgcgccgctcgccgcgctgtttcgcgcgggccgccgcatgccgctgcggttctttccgcgcagcgcatgggcgtgcgtgtccgacggcgacgcgaaggccgcgagcgtgtggatcaacgaacgtgtggcgagtgaggcggacgatccggccatcgcgatcgcgtggcgcggtgcgcacccgtctctcgacgagccgttcggcacgctcgcgcggctcgtattcgagccgatgctcgaacatctgaaggagctcgaatga

SEQ ID NO: 157201 - protein, 1112 aa, Burkholderia vietnamiensis G4
MLHLFYSNRHETLADALLEDLAAFPAHNGPWASQQVIVPSAALRRRLELDIAARHGVCANVEFTYLAQWLWAQIGRVLTVPARSPFAPDRLVWRCYRLFAQAADGAPWFASPRLAAYLSASDDAMRYELAQRVATVLDHYLTYRPEWLAAWQAGESVLAGDAAPRGISDAARDDERWQAALWRALLAELSDSGTPPAHRFLVEARNLDAETVERAEWPESVCVFALPTMPPLHVALLRELSRWIDVRIYALNPCREFWFDIVTAAHAEALDAAGRLDYQEVGHPLLAEWGRQTQAQLHMLHELTESAASGDASRFVENAAPSWLARVQNAILGLQPEAELGDAPAERGIEVHVCHSLARQLEVLHDRLLAWFDADATLQPSDVLVAVADLAAAGPLIDAVFGTAGAGAARVPYRITGLPPSQANPVARVLLEWLALPDRQVGAPELVEWLRVDAVAARYGIDAAALETVQTWLAAAGARRGLSPAVSDDAAVPAPRHTFADALARLFLGYAMPEGAAPIGAWLPIEAATGSEAELLGRLARFTDDLDGFAQRLAGALTPRAWSELFADTLARFFDSGAAYADALAGVRDALDAMLAAMTEGAPDEALPAAVVRAGLAAALDDPARGGVPWGGVTFSSLTSLRGLPYRVICLLGMDDGVLPSLARADEFDLMAVLPKLGDRQRRDDERNLFLDLLLAARDRLLIAYTGRSIRDNAPLPPAALVDELLDHLALVTAGADAAPEAVDAARRAFVVEHPLQPFAAEYFRPGSELASYDAERATLASLLAAEAARDASREQPFFAQPLAAEPVEPVAFGEFERFWRHPARALLRARLGIVLSDAQAELLDTEPFALDFAGSDALAERLLPLLIESDERDVHDHALRIADASPELPGGATGAVWRDQALGSMTQLASNVRRALAEGVARRPFTLTIAPAWPETADELFGVHDAMLSADAVSAPLELHGTLNRLTPAGQVIYRYARPSARDYLSAWLAHLVYCAVEPDGPRRSLWFGSGGAFELTPVAAPLERLAPLAALFRAGRRMPLRFFPRSAWACVSDGDAKAASVWINERVASEADDPAIAIAWRGAHPSLDEPFGTLARLVFEPMLEHLKELE

SEQ ID NO: 157202 - DNA, 3273 bp, Dichelobacter nodosus VCS1703A
  CDS (1)..(3273): transl_table=11
atgtttcgtatcacgcaagcaacggatttagctcatttaatgcccgattttttaacggcgctgcacgattatcccgatgatattttcgcggaaacagaaatcgtagtgccatcgatggcaatcgccgattatttagagcatcacatcgcggaaaaaatgggcatcagttgccggcatcgttaccgtttttggggcgaaatggaatggacgataatcgagcgtttaagtaaccgttccgcggcgcagacgccgttatccaccacggcgattcattggcaattattttcgtggttatacgcccaccgcgccgaaattctcgctgatgaagatcatgtgctggcgccgttattgcattatttattggcgccgtcttccgcgcgagacgagcaaactttgccgcgtttgtggcaattcagcggtgaacaagcgcaattattcacgcattatttaaaaatgcgtccggattggttattaacatggcaacaaaaacccgattgccatctagaagacatcatcgcaacgctgcccgaaatgcccacgtggttgcggcaacattatgatggcgtttttaccgtccaaaaatatttatggcaacagctttttgccgaagcgatggaacatcgtcagcagcgcatcgagcagttttatcaccgtttatccgttgatgacgcgcttccggcgttgccggcgcgcttatttgtgtttcacccgttttcattaaccgatcacatgctgcattggctgcaggcttttgggcaacgttgcgaggtgcatttgtggttagcgctggtgagtaatggttattttccggatatcgttgacgaacgctggcggcaatcgcacacgaatgccgacgaacatttccgcagcggtcatgttttggtttcacgattcggcaaacagcagcgcgatatttttcgcctgtgtcaatctcataatttattagaagagatacaacatattacgccgcattctgccgataccgcgcaacaatccttactccaacgtcttcaagcggatatgcgcgctttagacgatcaatccagcctcacggcagcgccgcttgttcccaatgacgacagcattcgcattcacggttgccacggattattgcggcaattggaattattgcgcgaagaattagtgcgctggttaaatgccgatgaaacaagacaattaagcgatattttaattgtgctgccggaattagaaagcgtgcaagatgtgattcgtaccgttttccccgccagcggagattatgacggcgccgttttgccggcgcgtttaaccggcattattgatagcagcgcgcaacgtttgtggcaggcaatctcgggaatttatgttttagcaaccacgccgtttaatcggcatacatttttacaatgggtattgcaagaagaagtgtgcacggcatacggcattgctgataaagccatgcaacgcacctgcgatcaattaattgcggcgggattttatcgtggttttgagcaacaagatttggaaaccgttgccgatggcgatgcgcgctttacgttgagttacgctttggaacgtttactttcgggattggcgatgccgcaggcggatatttggttggaaaatatcgtgccggaacacaatatacgcaatgacgatgccgccgcattagccgttttagcgcaaattcatcagcaaatcagcacgattcgcgtgcaacaaaaaaatcatacgacggcgcaattttggctcgatgaattgcggcaacgtttggaacatgatttttcggcttttcaaacgacggcggcgtggcaattaattgcgcaaacattaacggaattaacagaaaaattgcaggcgcatcatcaattaaccgcggcggctgcggatttatatttgccgttaccgtttattttgaactatatcggcgagcaattatccacccgacaagttgcctccgaacccagcggcgtaattacgattggacgcattggggcgatgcgcgcgttaccgtatcgtttaattgcgtttgtcggcgccgatcaagagcaatttccgcaccgaatcgccgaacaacggcataatttgttaacgattgatgcgccgcgtttgggcgattatcaccgcgaacacgacgaattaggcagttttttacacgcattaagcagcgccggcagtcatttttggtgtttttatactgccgttgatcccaatgatcatgaagaacgtttgcccgccgcacccgtgcaagaattattggattatttggcgcaaaacggcgttgatcaatatcttcattatcatctgcggcatcaacctaatccttttcaccgcgagccgtatcgcacggcaccggcgccgttgtggcaaaaagtgcagcatcatttacaacaatctgcgccagacgttttgccttttttgccggaatcggaaacatttaccgttaatcaagcagaaaaaacgatgttgctctctcaaattgcccgcgatttgttaaaaccggcgcggacgtttttgcgtgcccataaaatcgattgttcggttactgatgtggcaacggatattttagaaccgctggtttttgacgctcaatcagacggtttaaaacgttggcaaatttatcaagcgttattaaatgattcgccacattttcaatatttaccatttttaccggcgggcgcggcaggacatcattatcatttattgcaaaatcaacgcattgaagcgcagcgcgcgcaattgtttgaatgcacgggcgaacgggaaaatacgccgcttcagttgaaaaccgtatctttttctaacgggcagataagcgcggatttgccggcggtggaggtgaacaaatgggtatcgctttcggcaaggcgttatagtgttcgcagtattttttcggagtggctgcattatcttttgtggtgtgttcaaacgggcggcggcgaacgttggttgtcgtttgcggaaaaagaaatgagcgttgtttaccgctttttgccgttagaatgtgaaaccgccgaacgggaacttaaaaattggttggcgatttggtcacgtttggactcaattttaggtatgccgctggaaattgcctgggaaattgccgtggcgcaaaaagaaaaaaatcccgaaaaagcggttgagcaatggttaaataaagaaatctatgatgacgagaaagaatactggcaattattattgcgcgggcaaaacagcacggagcttctgctcaaacgctggcatgaatatcaaccattattcgcgtttttagtgcaacacattgaaaaaatagcataa

SEQ ID NO: 157203 - protein, 1090 aa, Dichelobacter nodosus VCS1703A
MFRITQATDLAHLMPDFLTALHDYPDDIFAETEIVVPSMAIADYLEHHIAEKMGISCRHRYRFWGEMEWTIIERLSNRSAAQTPLSTTAIHWQLFSWLYAHRAEILADEDHVLAPLLHYLLAPSSARDEQTLPRLWQFSGEQAQLFTHYLKMRPDWLLTWQQKPDCHLEDIIATLPEMPTWLRQHYDGVFTVQKYLWQQLFAEAMEHRQQRIEQFYHRLSVDDALPALPARLFVFHPFSLTDHMLHWLQAFGQRCEVHLWLALVSNGYFPDIVDERWRQSHTNADEHFRSGHVLVSRFGKQQRDIFRLCQSHNLLEEIQHITPHSADTAQQSLLQRLQADMRALDDQSSLTAAPLVPNDDSIRIHGCHGLLRQLELLREELVRWLNADETRQLSDILIVLPELESVQDVIRTVFPASGDYDGAVLPARLTGIIDSSAQRLWQAISGIYVLATTPFNRHTFLQWVLQEEVCTAYGIADKAMQRTCDQLIAAGFYRGFEQQDLETVADGDARFTLSYALERLLSGLAMPQADIWLENIVPEHNIRNDDAAALAVLAQIHQQISTIRVQQKNHTTAQFWLDELRQRLEHDFSAFQTTAAWQLIAQTLTELTEKLQAHHQLTAAAADLYLPLPFILNYIGEQLSTRQVASEPSGVITIGRIGAMRALPYRLIAFVGADQEQFPHRIAEQRHNLLTIDAPRLGDYHREHDELGSFLHALSSAGSHFWCFYTAVDPNDHEERLPAAPVQELLDYLAQNGVDQYLHYHLRHQPNPFHREPYRTAPAPLWQKVQHHLQQSAPDVLPFLPESETFTVNQAEKTMLLSQIARDLLKPARTFLRAHKIDCSVTDVATDILEPLVFDAQSDGLKRWQIYQALLNDSPHFQYLPFLPAGAAGHHYHLLQNQRIEAQRAQLFECTGERENTPLQLKTVSFSNGQISADLPAVEVNKWVSLSARRYSVRSIFSEWLHYLLWCVQTGGGERWLSFAEKEMSVVYRFLPLECETAERELKNWLAIWSRLDSILGMPLEIAWEIAVAQKEKNPEKAVEQWLNKEIYDDEKEYWQLLLRGQNSTELLLKRWHEYQPLFAFLVQHIEKIA

SEQ ID NO: 157204 - DNA, 3318 bp, Synechococcus sp. WH 7803
  CDS (1)..(3318): transl_table=11
ttgctgaggatttatcgcagcaaccgagccgagcttctggctcagctgctcgctcaggagctcaatctcaacccaccagggcctttcgaacaggttgaagtggtggtgaacacctggcccacgagccgttggcttggggaacgcctggccagcttcaacggaatcagcgccctcgttcgcttcccttttcccgggagccgcctgcgccaactggcgcaagccgtgctgagcaaggagccccccctggaggatccctggcgtgccgaacgcttggtgtggacggtgatcgctgtgcttccgcaactgatgcagtgtgaggaagccaagccgctcaggcagtggtggaacaatcagcgcacgacaagcgacgcgctgacgcgggagcagtggttgcttgctcgccagctggcggatgcggtggatgattacgcgctctaccgcccccaagacctggctggctggctggctggcgatgacggagaccatctcccagccgttctgcgttggcagcccctgcttgtgcgtgcgcttgctgagcgccttccctgcgaacccttcggcctgcaggttcaacaggccgtggatcagctgcgctcggggcaggcgccggccacaccactgccgaagcgcctgaggctgttcggtctcagcaatctcgccccagtgcagatcgatctgctgcaggcactggctgccgtgatgcaggtggagctctacttgctaacgccctgcccagacctgtgggagcgatcagcgcaacgacggcgccgactgggcgagaactggaccgcatcccctgatggaacctggctgatcgaggctccgaaactggaggccatcctcggtcgcatgggaggggaattccagctgctgctggagggcagtggcgactgcttactcagcagcacggaccaggctgatctgttcgccgacccggtggcgatggcagcgtctgaaggcaggcaggggtccttactggagcaactgcaacgacagctcgcaagcagcgaacactttcccttgcagcacacgagcgctgatcgctcgctgctgttcatgggctgtgcaggcccctggcgggaagtgcagctggtgcgggaccagattcttcactggatggccgacgattccacgcttcaaccccgggacatcctcgtgatgactcccgatgttgagcgttatgccccgctgctggcctccgtgctctctgaccaggacgccactggagtggatctgccctggcgcctgacggaccgcagtcagcagaacagccctggattgcagcaggccttcatgaccctgctgcagctcagtgcggagcgtctcaccgccacaggactggaagcactgatgagcaatccggcgtttctcgatcttcagggtcttgaggcccaggaggcgatggacatcaccgctgccttgcaacgcagcggcttccgttggggactcgatcgagaggagcgccatggcgatgacacccacagcctgcgctggtgcctggatcgctggctcatcggcctgatcctccccgatgagcctggcctggcactcggcagctgtgcacccgccgtcgcggatctcagccttcagcagctcgagcgctggtggccactcctggaccagatcgcccagtggatcgcgcagttgcgccaaagcggaagctgcacggtgtgggtggaacgcttgcggcggctgctctccgatctcttcggcgacggcggtgcctgggattgggaactgcaggccatccagcaaggcctagagacctggctgatccaggcaggccactgcgagctcaacctggaaaccactgtggtgatcgcagttctcgaggaagcactgtcggccgacagtggccgcttcgggcaccgcagcggtgccatgaccgtgagcgccctcgaaccgatgcgtgccatcccccatcgggtgatcgtgctgatggggctggatgccgcctcctttccgcgcacgcgcgaacgcccgggatttcatctgctggagcggcagcggcggcttggggacccaagcagtacggatcaggatcgctatgtgctgctcgaggcgctgctctcctcccgtcagcacctcttaatcagctggagcagccgtgacgaacgacggggcgacgcactgccaccctgcccgcccgtgcagcagtggctcaacctgctgcgccaggagctcagcgaggaggcgatggcacaggtgctgatcgaaccaccggccaaccctttggatgcagccaacttcatccctgccaaaacgcacgctttgagctgcgaccgtcgcctgcttcaggcccggcagtgcctggatgatccgcaaggccgggccccaggccacgcccccctcggtctcgccctgcccattcactggcccccggaggcgcctcccccgccagcgcacgccaccacgctgaacagcgaccaagtggaacagctggaacgctggctgcaggctccccaaagagcctggctgcgggagcggggcatcgaagccggggaatggtgcgatgccgttgaagatcgtgcaccgctggccctgcccgaacgcaccctccgcgccttgatcaccgagcgcctgcgtgatgaactcgatcggctcaagacccaccctgaagcccggtgggacgtcaccagatctggagagtggatccgctggagtcagggccggggactgctgccgcccggggctgggggggccttggacgacatccgcctggaacaacgctggaaaaacctgcaaaccactctgttcagcctcggatccctccagcagcctccgcgatgggaaaggcttgccactcctcccctgcccatggcgggagagaccgcggtgttgatcagtgcctccaagcttcaggcccgcagcgtgctcgagggctggctgaagcatctgctcaaccaacgggccggccgagccgctccgacggtggtgatctgccgcggtgagagcagcagcaaagctgaaaccttcagcatcgccatgcgctggctgccgatggagtcgcagcaggctgatggcttactcagcgacctgttcgcgctggctgaggaaggacgccggatctgctggccgatccccccggaaagcggactggcccgggccgttgctctggccaaaggcagagacgttgccgaccgcgccttcagcgcgtgctggcatggcggcatcaaacgctgggcggaacgggaacgcagtgatctccaggcctgtttcggtaacggttgcgatgcggaacgactgctcagcagcccggggttcgacagtgcgttcgacagcttgtatgccccgctgctcgaggccagacgtccatga

SEQ ID NO: 157205 - protein, 1105 aa, Synechococcus sp. WH 7803
MLRIYRSNRAELLAQLLAQELNLNPPGPFEQVEVVVNTWPTSRWLGERLASFNGISALVRFPFPGSRLRQLAQAVLSKEPPLEDPWRAERLVWTVIAVLPQLMQCEEAKPLRQWWNNQRTTSDALTREQWLLARQLADAVDDYALYRPQDLAGWLAGDDGDHLPAVLRWQPLLVRALAERLPCEPFGLQVQQAVDQLRSGQAPATPLPKRLRLFGLSNLAPVQIDLLQALAAVMQVELYLLTPCPDLWERSAQRRRRLGENWTASPDGTWLIEAPKLEAILGRMGGEFQLLLEGSGDCLLSSTDQADLFADPVAMAASEGRQGSLLEQLQRQLASSEHFPLQHTSADRSLLFMGCAGPWREVQLVRDQILHWMADDSTLQPRDILVMTPDVERYAPLLASVLSDQDATGVDLPWRLTDRSQQNSPGLQQAFMTLLQLSAERLTATGLEALMSNPAFLDLQGLEAQEAMDITAALQRSGFRWGLDREERHGDDTHSLRWCLDRWLIGLILPDEPGLALGSCAPAVADLSLQQLERWWPLLDQIAQWIAQLRQSGSCTVWVERLRRLLSDLFGDGGAWDWELQAIQQGLETWLIQAGHCELNLETTVVIAVLEEALSADSGRFGHRSGAMTVSALEPMRAIPHRVIVLMGLDAASFPRTRERPGFHLLERQRRLGDPSSTDQDRYVLLEALLSSRQHLLISWSSRDERRGDALPPCPPVQQWLNLLRQELSEEAMAQVLIEPPANPLDAANFIPAKTHALSCDRRLLQARQCLDDPQGRAPGHAPLGLALPIHWPPEAPPPPAHATTLNSDQVEQLERWLQAPQRAWLRERGIEAGEWCDAVEDRAPLALPERTLRALITERLRDELDRLKTHPEARWDVTRSGEWIRWSQGRGLLPPGAGGALDDIRLEQRWKNLQTTLFSLGSLQQPPRWERLATPPLPMAGETAVLISASKLQARSVLEGWLKHLLNQRAGRAAPTVVICRGESSSKAETFSIAMRWLPMESQQADGLLSDLFALAEEGRRICWPIPPESGLARAVALAKGRDVADRAFSACWHGGIKRWAERERSDLQACFGNGCDAERLLSSPGFDSAFDSLYAPLLEARRP

SEQ ID NO: 157206 - DNA, 3330 bp, Klebsiella pneumoniae subsp. pneumoniae MGH 78578
  CDS (1)..(3330): transl_table=11
atggagtttatcgtcgagcgccagcggctggatgacccttttcaggccgaaatggtgctggtgcagagtaccggcatggcgcagtggctgcagatgaccctggccgcgcgcttcgggattgccgccaatatcgagttcccgctgccggcgagctttatctgggatatgttcgtgcgcgtcctgaaagatattccgggcgaaagcgccttcagcaagcagagcatgagctggaagctgatgaccctcctgccgcagcacctggaggaagacgattttatcctgctgcgccagtatctgagtgatgacggcgacaagcgcaagctgtttcagctggccgcccgggtggcggacctctatgaccagtacctcgtctatcgcccggagtggctgatgcgctgggaggccggccagcgggtggaaggtctcggcgatgcccagcagtggcaggcgccgctgtggcaggcgctggtgagctataccgccgagctggggcagccgcagtggcaccgcgccaatctctaccagcgctttatcagtaccctggaaaaagcggacgaaccgcccgccgggctgccgtcgcgcgtcttcatctgcgggatttccgcgctgccgccggtctatcttcaggcgctgcaggcgctgggtaagcatgtcgatgtctatgtcttgtttaccaacccctgccgctactactggggagacattaaggatccggcgttcctggcgaagctgctgtcgcgccagcggcgccatcaccgcgaggcgcgcgcgctacctctgtttcgcgacaccgagcaggcgccggggttgtttaatgacgccggggaacaggatgtcggcaacccgttgctcgcctcctggggcaaactggggcgcgactatatctacctgctggcagggctggagcgctatgaggaactggacgcttttgtcgacatcgcccccgataacctgttgcataacctgcaatcggatatcctcgaactgcgcaacgcggcggtggccgggcagagcgcagaggcattcgcccacagtcgcgacaaacgtccgctggcgctggatgaccgcagtctgagcattcacgtctgccacagtccgcagcgcgaagtggaggttctgcacgataggctactggcgatgctggaggcggatccgacgctcacgccgcgggatatcatcgtcatggtggcggatatcgacagctacagcccctatatacaggcggtgtttggcgccgccagcggcgatcgctggctgccgtgggcgatctccgaccgtcgcgcccgagagtcgcacccggtgctgcaggcgtttatcacgctgctctcgctgccggacagccgcttcgccagtgaagatgtgctggcgctgctggacgtcccggtgctggcggcgcgctttaatatcacggaagaagggctgcgctacctgcgccagtgggtgaacgagtccggcgtccgctggggaatggatgacgacaacgtccgtgagctggacctgccggcgaccgggcagcatacctggcggttcggcctcacccgcatgctgttgggctacgcgatggacagccgcgagggagaatggcagtcggtgctgccatatgacgaatccagcggtttgatcgccgagctggtgggcaacctcgcgtcgctgctgatgcagcttaatctgtggcgacgcggcctggcccagcagcggccgctggcggagtggctaccggtctgtcgcgatctgctgaatgactttttcctgccggacagcgagaccgaagcggcgctggcgctgattgagcagcagtggctggcggttattgatagcggtctggaggcgcagtatggcgagcaggtgccgctgacgctgctgcgcgatgagctggcccagcgcctcgatcagcagcggatcagccagcgctttcttgccggcccggtcaatatctgtaccctgatgccgatgcgttcgatcccctttaaggtggtgtgcctgctggggatgaatgacggggtttatccgcgcacgctaccgccgctgggctttgatttaatgagccagaagccgcagcgcggcgaccgcagccggcgcgatgatgaccgctatctgttcctcgaagcgctgatgtccgccgagcagacgctgtatatcagctatatcggccgttcgatacaggacaacagcgagcgttttccttcggtgctggtgcaggagctggtggattatatcggccagagccactgtctcgccggtgacgaagagcttgactgcgacgccagcgaagcgcgggttaaagcccatatcacccatctgcatacgcgcatgccgttcgacgttgccaatttccaggaagacgagaacaagagctacgctcgtgaatggctggcggccgccggccagcagggagaggcgcatagcgattttatacagccgctcaccgcgccgccgattgacagcctgccgttcgatcagcttctgcgcttctggcagcacccggtacgcgcgttctttcagcagcgtttgcgggtcaatttccgcgccgaagaggacgatattccagacgacgagccgttcactcttgaagggctgagccgttatcaactgaatcagcaactgctcaatacgcttattgaggagcaggacgtctcggctatgttccgccgctttcgcgccgccggcgagctgccgtatggcgcctttggcgagctggtctgggagacgcagcgcctggagatgcaggcgctggccgagcgggtgatggccgagcgccagcaggcgcagagcatggagatcgatctgcagtgcggcggcgtgaacctgaccggctggctgcagcaggtgcagccggacggtctgctgcgctggcggccttcgctgctgagcgtctcccaggggatgcaactttggctggaacaccttgtctactgctccagcggcggcaccggcgagagccggctgtttgtgcggaaagagggagagtggcgctttccggcgctggcgcccgccgaggcgcaggcgtaccttaacgagctggtggatggctatttgctggggatgtcgcagccgctgctgctgctgccggaaagcggtggcgcctggctgaaagcctgttacgacgccgaaaaggatgtcatcttaatggacgaagagacgcagcagaaagcgcggagcaaattcctgcagacctacgaagggaacatggtggtcagcggggagggcgccgatatctggtatcaacgcctgtggcgttcgctggagccggcgcattacgaagaaatcattgcccagacgcagcgttatctgttaccgctatatcgttaccatcggtccacacaaatttaa

SEQ ID NO: 157207 - protein, 1109 aa, Klebsiella pneumoniae subsp. pneumoniae MGH 78578
MEFIVERQRLDDPFQAEMVLVQSTGMAQWLQMTLAARFGIAANIEFPLPASFIWDMFVRVLKDIPGESAFSKQSMSWKLMTLLPQHLEEDDFILLRQYLSDDGDKRKLFQLAARVADLYDQYLVYRPEWLMRWEAGQRVEGLGDAQQWQAPLWQALVSYTAELGQPQWHRANLYQRFISTLEKADEPPAGLPSRVFICGISALPPVYLQALQALGKHVDVYVLFTNPCRYYWGDIKDPAFLAKLLSRQRRHHREARALPLFRDTEQAPGLFNDAGEQDVGNPLLASWGKLGRDYIYLLAGLERYEELDAFVDIAPDNLLHNLQSDILELRNAAVAGQSAEAFAHSRDKRPLALDDRSLSIHVCHSPQREVEVLHDRLLAMLEADPTLTPRDIIVMVADIDSYSPYIQAVFGAASGDRWLPWAISDRRARESHPVLQAFITLLSLPDSRFASEDVLALLDVPVLAARFNITEEGLRYLRQWVNESGVRWGMDDDNVRELDLPATGQHTWRFGLTRMLLGYAMDSREGEWQSVLPYDESSGLIAELVGNLASLLMQLNLWRRGLAQQRPLAEWLPVCRDLLNDFFLPDSETEAALALIEQQWLAVIDSGLEAQYGEQVPLTLLRDELAQRLDQQRISQRFLAGPVNICTLMPMRSIPFKVVCLLGMNDGVYPRTLPPLGFDLMSQKPQRGDRSRRDDDRYLFLEALMSAEQTLYISYIGRSIQDNSERFPSVLVQELVDYIGQSHCLAGDEELDCDASEARVKAHITHLHTRMPFDVANFQEDENKSYAREWLAAAGQQGEAHSDFIQPLTAPPIDSLPFDQLLRFWQHPVRAFFQQRLRVNFRAEEDDIPDDEPFTLEGLSRYQLNQQLLNTLIEEQDVSAMFRRFRAAGELPYGAFGELVWETQRLEMQALAERVMAERQQAQSMEIDLQCGGVNLTGWLQQVQPDGLLRWRPSLLSVSQGMQLWLEHLVYCSSGGTGESRLFVRKEGEWRFPALAPAEAQAYLNELVDGYLLGMSQPLLLLPESGGAWLKACYDAEKDVILMDEETQQKARSKFLQTYEGNMVVSGEGADIWYQRLWRSLEPAHYEEIIAQTQRYLLPLYRYHRSTQI

SEQ ID NO: 157208 - DNA, 3477 bp, Kineococcus radiotolerans SRS30216
  CDS (1)..(3477): transl_table=11
atgctccacgtccaccgctccgagagcgcgaacaccctggtgaccgccctcgccggcctcctgcgcgaccccgcgccgggcgccgacccgttcgcccccgacgtcctcgccgtgggggcccgcggcaccgagcggtggatcgcgcagcggctgtcgcaccacctcggcgccggcgaccccgccgcgggcggcggggacgacgggatctgcgcgcgggtggacacctcctccccggcgcacctgctcgacggggtcctcgccgcggcgctcgagcgcacccgccccgggaccggcgacgccgtcgagcggtgggcgccgtcgtcgctgacgtgggacgtcctggaggtcctcgacgagatcgcccccgccgacggcggccccgcccccgacgggcgcccggagttcgccctcctgcgccaccacctgcgccaccaccccggcgacgacggcccgggcggcccggggggcccgggcaccccgcccgtgcgccggacggccgccgcggcccgggtggcggggctgttcgcccgctacggcgcggcccgcccgcagctgctcgcggactgggccgccgggcgcgacgacgcccccggcgccccgctgcccgcggacctgcgctggcagccggaggtgttccgcgccgtgcgcgagcgcgtcggcctgcccgcgcccgccgaactgctcgacgacgcctgcgccgccctgcgcaccgacccggccctgagcgacctcgggccccgcctcgcggtgttcctcgtgacccgcctggccaccagccggctgcgggtgctgtccgcgctcgccgagcaccgcgaggtccacctcctcctccagcaccccagccccgcgctgtgggacgccaccgccgcggcgctgcgcacggacccgggaccgcggcgcgcggcctgggcggcccacgcccccggccgccacccgctgctgcggtccatggcccgcgacgtgcgggagctgcaggtgcgcctggcccacgccgcccccgggcacaccgacgtccaccaccccgccccggaaccggcgcccaccctgctcgggaccctccaggcggccctggcccgcgacgccgagcccgcccccgggccggacccgggggaccgctcggtgcaggtgcacgcctgccacggccgcgcccggcaggtcgaggtgctgcgcgaggtcgtcctcggcctcctcgacgccgacccgacgctgcagccgcgcgacgtcctcgtcgcgtgccccgacgtcgagaccttcgccccgctggtctcggccgccttcgccaccgactcccaccccggcggggggctgcgggtgcaggtcgccgaccgctccgcgctgcggaccaacccgctgctcggtctcgccgtccggctgctggggctggcgcagtcgcgggccggcgccaccgaggtcctggacctcgccgccgccgccccggtgcgccgccgcttcgacctcgacgacgaggacctcgagcagctgcgcgagtggaccgtcgccgccggggtgcactggggcctcagcgcccgccaccgcggcgcctggcagctcggctccctggaccaggggacgtggcgggccgggctggaccgcctcctcgtcggggtcgccgtcggcggcgccgtcgaggacgacctcgtcgggcgcaccggggaggacgggctgctcggcgcggtcgtcccgctggccgacgtggagtccagccgcatcgacctcgccggccggttcgccgagctcctcgaccgcctcgacgccgccgtcacccgcctgcagggccggcacggcgtcgccgcctggtgcgacacgctcctcgacgccgtcctcgacctcgccgacaccgcccccgaggacgcctggcaggtcgcgcagctgcgccgggagctcggcgtcgtcgcccacgacgccgcccgcgccgggaccgcgcgggtcggcctgaccgacgtcgccgccacgatctccgaacgcttcgccgcgcacccgcagcgggcgaacttccgcaccggggccctcaccgtctgcacccccgccccggtgcgcgccgtcccgcaccgcgtcgtctgcctgctcggcatggacgacggcgccttcccccgggcgggcggccccgacgccgacgacgtcctcgcccgcgacccccacgtcggcgaccgcgacccgcgcggcgaggaccgccaggtcctgctcgacctcgtccgctccgcccgggacgccctcgtcgtcacctactccgggcgcgacgtccgcaccggggcggtgctgccgcccgcggtgccggtgggggaggtcctcgacgccctggaggccgcccaccccggggtgcgcgcgcgcatcgaggtccaccaccccctgcagcccaccgaccggcgcaacttcacccccggggccctgggcaccgacgggcccttcagccacgacggcacggcgttctccggagccgacgccgggcaccgcgaacccgcccccgtcccgccgttcctgcccgcggccctgccgccggcccccgccgcggacctcgacctcgacaccctcgtgcagttcctccagcaccccgcccgggggttcctgcgccagcgcctcgacgtcgcctccgccacccgcgaggaggaacccgacgacgcgctccccgtgcagctggacgccctgcagaagtgggcggtgggcgaccgcgcgctcgcggcccggctgcggggggtcgcggcccccgaggtcgtgcggctggagggcgcccgcggcggcctgccgcccgggccgctgggggtggcggtgctgcgcgaggtcggcccggtcgtcgacgccatcgccggggtcgccgccgagttcgacaccgcccccccgcgcagcgtcgacgtcgagctcgacctcgacgtccccggcgtcgggcagctgcgcctgaccggcaacgtccgcggggtccgtccggtgcgcggcgggggccgggccaccggcgaggtcgccgtcaccaccgtctactcccgcatcaagggcaagcagacgctgcgggcctgggtcgagctgctcgcgctgtccgccgcccacccggggacggagttccggaccgtcctcgtcgggcgcggggaccgcggcagcaccgggttgctgaccctgggcccggtgcgctccgacgcggcccgggacctgctggtggacctgctggagctgcgcgcggtcgggctgcggttcccgctgccgctgccggtggacaccgccgcggcgtgggcgcaggaggcctggcgcgggcgcgcccccgacgcctgcctgcgggcggcgcggcgggcctggacctcggacttctccttcgacaaggaggaccggcaggaggagaacgtgaccgtgtggggtgcggagcgacccgtcgagcacctggtgcggtgggaaccgccgacgaccctgcccccgggcgtcccgaccacgttcgaggggttggtgcgccgggtgtgggaacccctgctgggggtccagcggatggacgagcggtga

SEQ ID NO: 157209 - protein, 1158 aa, Kineococcus radiotolerans SRS30216
MLHVHRSESANTLVTALAGLLRDPAPGADPFAPDVLAVGARGTERWIAQRLSHHLGAGDPAAGGGDDGICARVDTSSPAHLLDGVLAAALERTRPGTGDAVERWAPSSLTWDVLEVLDEIAPADGGPAPDGRPEFALLRHHLRHHPGDDGPGGPGGPGTPPVRRTAAAARVAGLFARYGAARPQLLADWAAGRDDAPGAPLPADLRWQPEVFRAVRERVGLPAPAELLDDACAALRTDPALSDLGPRLAVFLVTRLATSRLRVLSALAEHREVHLLLQHPSPALWDATAAALRTDPGPRRAAWAAHAPGRHPLLRSMARDVRELQVRLAHAAPGHTDVHHPAPEPAPTLLGTLQAALARDAEPAPGPDPGDRSVQVHACHGRARQVEVLREVVLGLLDADPTLQPRDVLVACPDVETFAPLVSAAFATDSHPGGGLRVQVADRSALRTNPLLGLAVRLLGLAQSRAGATEVLDLAAAAPVRRRFDLDDEDLEQLREWTVAAGVHWGLSARHRGAWQLGSLDQGTWRAGLDRLLVGVAVGGAVEDDLVGRTGEDGLLGAVVPLADVESSRIDLAGRFAELLDRLDAAVTRLQGRHGVAAWCDTLLDAVLDLADTAPEDAWQVAQLRRELGVVAHDAARAGTARVGLTDVAATISERFAAHPQRANFRTGALTVCTPAPVRAVPHRVVCLLGMDDGAFPRAGGPDADDVLARDPHVGDRDPRGEDRQVLLDLVRSARDALVVTYSGRDVRTGAVLPPAVPVGEVLDALEAAHPGVRARIEVHHPLQPTDRRNFTPGALGTDGPFSHDGTAFSGADAGHREPAPVPPFLPAALPPAPAADLDLDTLVQFLQHPARGFLRQRLDVASATREEEPDDALPVQLDALQKWAVGDRALAARLRGVAAPEVVRLEGARGGLPPGPLGVAVLREVGPVVDAIAGVAAEFDTAPPRSVDVELDLDVPGVGQLRLTGNVRGVRPVRGGGRATGEVAVTTVYSRIKGKQTLRAWVELLALSAAHPGTEFRTVLVGRGDRGSTGLLTLGPVRSDAARDLLVDLLELRAVGLRFPLPLPVDTAAAWAQEAWRGRAPDACLRAARRAWTSDFSFDKEDRQEENVTVWGAERPVEHLVRWEPPTTLPPGVPTTFEGLVRRVWEPLLGVQRMDER

SEQ ID NO: 157210 - DNA, 3258 bp, Desulfococcus oleovorans Hxd3
  CDS (1)..(3258)
atgtatttttttacaagtaaccgcatggagatgctgtcccgcgccttttgcgaggccctgacggcatatcccctggacaatccttttgcgcgggaaaccattgttgtccagagcatgggcatgaagcggtggctctccatggagatggcccgccacaccggtatttgcgctcacaaccggtttcttttccccaacgcgtttttaaaccagatgctgcagaccgcctttgccgatgcggtcccggtttctcccgatgtgggggtggaggccatgacatgggccgtttttccggtcctggccgatgtttttgcccatcccgccctttcgccccttcaggcctacctgcaggacggcgatgtgatcaagcggtaccagctggcggcccggattgccgacacctttgatcagtacctggtgtttcggccggacatgctgctgcagtgggaagccggcgcgcttcccgcggacccccatgaaaagtggcaggctcacctgtggcggcttctgatttcccagggctgggccgaacagcgggccgaacgctggaaacagtttctctccctggcccagagcggggcgcttgccggcagcacccttccatccagggtgtccgtgttcggcatatcaacgctgccccggttccatgtgcaggtgtttgccgcgctttccgctttcctggaggtacggtttttcgtattgaacccctgccgtcactactggggagacatcctgtccacctatgaaaagaaacaggtagagacaggggccgacgcccgggatattccggaagcggctcgccacctggaaacgggtaacagccttctggcctccatgggaatggtggcccgtgatttttttgccatggtggaggaccatccccaccaggagacctcgctgtttgctcctgccggggagaccaccatgctggcctgccttcagaacgatattctggacctgaaggatgcggctgaccaggagcgggtgcgggtggacggaaatgacgcctctatgcagatatccgtctgccacagccccatgcgggaggtagaggcgcttcatgacaacctgctggccatgtttgaggcggatgccggcctatcgcccgaggatgtgctggtcatggcgccgaacatggaggtgtacgccccctatgtggaagcggtgtttgatgccggtgccgacgatggaggacagcgggtcccttacacggtcacggaccgccgttcaaagtcgggcagcccggtggtcaggacttttctgggcctgatggacctctgggaatcccgctttggaatatccgccgtgcttgaaattctggaatccgcctttgtccgggagcggttcgatatcggagaggccgagttttttcgcatttcccagtggctggtcgatgcgggcgtacggtggggacttgacggtgccttcaagacagaccgggaccttcccgaattttctgaaaacacctggaagcagggcatcgacagcctggtgctgggatgcgccatggccgggaagggtgaaatcctttttgacggcctgctgccctatgatcatatggagggcagtgacgtcgacagccttgaaaagtttctggcgttctggcatgtgctgctccggttttaccggcagtgcggcggcgcccacgccccgggccggtggcgacagatactgaccgcgctggtggagtcgatgtttgccgcggacccggccgttgaggcggaccttcaggtgataaccgatgccctgaacgcccttggggaaagcgcggcccacgccgggtttgacggcccggtggacctcccggtgatcagggaatttttaaaccgccgtttcgagggccaggcctacggcgcgccgtttatttccggcggcgtcaccttctgctccatgctgcccatgcgcagcattccctttgccgtgatctgtctgctgggcatgaacgtggacgattatccgcggcagaccttttctcccggttttgacatgattcgcaaacacccccggcccggggaccgctccaagcgaaacgacgaccggtacctgtttctcgagaccctgctgtcggcccggcggcggctctacatcagttacgtgggccatgatatgcgggacaacagtgaccgtccgccttcggtgctggtgggcgaactgtgcgactaccttcgggaacggttcgacgccggccccttgaccgacgtggtggaaaagatcaccacccaccaccggcttcagccttttcacccggactatttctccagcgacacgcaagcgcggttcagctatgccgctgattatctggccgcggcccggcagctggccggcggccgaccgggtcggccggccgcactggaaccggcggtcccggtccctgacaacgcggacccccagaccattgaggtggaggacctgtgccgttttttcgcccacccggcccgctattttctgacgcagcgtcttggcctgcgcgtcgccgagaccgaccgtattccggaagaggccgaaccgtttgaggtggccgggctggagcggtatgacatggcccggcggctggtagaacggctgctggctgaagacccggcggcaccactggaaaacgcgctgcgggccagcggcatcctgccgcatggtgaaccgggaaagcgactgtttgaacggttgaaaaccggggccgccggctttgtcgccggtgttcgggcggtgacagccaatggtggcctggaccgccgggagatacggctggatatcaacggcaccaccctttgcggtaccctggatgggatcggtgaacaggagtggttccggtttcggtacgcaacggcccggcccggtgattttatcaccaactggatcgcccatctggcctggagcgtggaccagggccgtgccggctcaggtcggttcgcggccagggatggatggtgggcctttgatccggtggataacggcctgtcgatactggcggccctgattgaaatttaccggcagggacgcctgcgccctctccattttttcccccgcagcgcttttgtctatgccgaaaccctgcaaaaaaaaggcaatgcgtccatggccctggaccgggcacttcaggcatggcggggcaacgaacgggtggccggagaaaaagaggaccctttttacgcgctctggtttgccggggacgatcccttggacgatgaatttgaaaccctttccacggcagtggtgaccccgctgctggcctgcaggagaccggatggcccgccgcgaaccgtttga

SEQ ID NO: 157211 - protein, 1085 aa, Desulfococcus oleovorans Hxd3
MYFFTSNRMEMLSRAFCEALTAYPLDNPFARETIVVQSMGMKRWLSMEMARHTGICAHNRFLFPNAFLNQMLQTAFADAVPVSPDVGVEAMTWAVFPVLADVFAHPALSPLQAYLQDGDVIKRYQLAARIADTFDQYLVFRPDMLLQWEAGALPADPHEKWQAHLWRLLISQGWAEQRAERWKQFLSLAQSGALAGSTLPSRVSVFGISTLPRFHVQVFAALSAFLEVRFFVLNPCRHYWGDILSTYEKKQVETGADARDIPEAARHLETGNSLLASMGMVARDFFAMVEDHPHQETSLFAPAGETTMLACLQNDILDLKDAADQERVRVDGNDASMQISVCHSPMREVEALHDNLLAMFEADAGLSPEDVLVMAPNMEVYAPYVEAVFDAGADDGGQRVPYTVTDRRSKSGSPVVRTFLGLMDLWESRFGISAVLEILESAFVRERFDIGEAEFFRISQWLVDAGVRWGLDGAFKTDRDLPEFSENTWKQGIDSLVLGCAMAGKGEILFDGLLPYDHMEGSDVDSLEKFLAFWHVLLRFYRQCGGAHAPGRWRQILTALVESMFAADPAVEADLQVITDALNALGESAAHAGFDGPVDLPVIREFLNRRFEGQAYGAPFISGGVTFCSMLPMRSIPFAVICLLGMNVDDYPRQTFSPGFDMIRKHPRPGDRSKRNDDRYLFLETLLSARRRLYISYVGHDMRDNSDRPPSVLVGELCDYLRERFDAGPLTDVVEKITTHHRLQPFHPDYFSSDTQARFSYAADYLAAARQLAGGRPGRPAALEPAVPVPDNADPQTIEVEDLCRFFAHPARYFLTQRLGLRVAETDRIPEEAEPFEVAGLERYDMARRLVERLLAEDPAAPLENALRASGILPHGEPGKRLFERLKTGAAGFVAGVRAVTANGGLDRREIRLDINGTTLCGTLDGIGEQEWFRFRYATARPGDFITNWIAHLAWSVDQGRAGSGRFAARDGWWAFDPVDNGLSILAALIEIYRQGRLRPLHFFPRSAFVYAETLQKKGNASMALDRALQAWRGNERVAGEKEDPFYALWFAGDDPLDDEFETLSTAVVTPLLACRRPDGPPRTV

SEQ ID NO: 157212 - DNA, 3588 bp, Candidatus Protochlamydia amoebophila UWE25
  CDS (1)..(3588)
atgttcttgctaaaattttatgttggattcaacaaaactgtatgcaaggaaggatgtaaacttctaaccctaacagttgatacaccaaaaagtgagccctttgtgagcgatttagaagttttttttagtaaccagctatcaatcctctacgagcagctgaagaataatcttttcggttttaagcaaacgcctttcaaaaagcgacttgtgattgtttatggaccagccatgcaaacatggctaactttaaaaatggcgcaagaccctgatttaggaatagcagctggaattgaatttctatatcttaatcaggcttttgaaacactcattcactattttcaattaaaaaatgaaaagataccttctattttagagctatctttggccattgaaaaagaattattaactgttttgcaagattatcatcggttaagtgatgaagaacaacaagactggttaactttgatttattatttaaaattaaattctaagcaggtgggcgaaaatcttaaattaacacgtaaaatggaaaagcgattgacaggtttaagctatcatttagctaaaatttttcaagagtatggaaaatatgcttattcattagtctctaaatgggaaaaatcagaacatagaggttggcagagtcgtttatggaaaagcctttttgggggcaatcaaggatggacttattggactaaagccttccaaaaaacacttaaattttttcctgagtgtgaagtccattttttctcaatcagttttatttctaaagctgaatttcaatttttatcgaagctggcgaatgttgcccctatttactattatttactttctccatgcgcagttttttggagtgatattcgttccgataacgagacaagatatttgcaaacctactggcagcagaaattaggctcgaaggcttctcaagttttacaattagaagaacttttaagagatcgaaatccccttttagctaattttggaaaacttggaagagaaatggcttatcaaattgaggagagtcaagctactactcacgctggttatatccttccaagtcatgtgagtgaattgaatgatgaaatattttttcaagaagatctttttttaaaggagtctttacaacctttgactcttcttcatgcaattcaagctgatatattgatgatgcgtaaccctgaaggaaagcctccttttaattttgaacgaaaagatgattcaatccaattgcacattgctccctcgattcgacgtgaaatacaaatcctttatcacaatcttttaaaattatttgaaaaagattctactttgcaacccaatgacattattgtgatggctcctcaaatttctgattacgtcccttacattcaaagtgtttttggtttagaagaaagtcaattagattttcaaattcttgatttgggcatgcaagcacaaagtgaaatcgtccaaggttttttccaattgattcggttaagtgaaagtcgttgggaagtgagtgaattattacagttgtttgggcaccgtctatttcaacgatgtcatcaattgactcaaagtgattattatctcattcaagaatggattcaacaagcaggcatccgttggggagaagattggctacatcgaaatgagttacttcagaggcatcattgtgagaaagagatggtagattctagctcagttggaacctggaattttggtttaactcgtttgttacttggattaacaacagttgtcaaatctgccgattctcattcttttgattctattccatgtgaaggaattgacttttctcaagcagaattaatggagaggtggattcgattgttgcattctttacgagatgatttatcgccattacatgatcgctctcaaatgtgtatggaagaatggtcttgttatctctcttgtttattagacacttattttaagtgtgaatttgaagattctcagtcgatagcagactacgaagaattaaaatctcaatttaagcttttaggtgattctgcaaaaacttttaaagaaacaaaattttctttccaaactattaaatttcatttgaacaatcttttacaacaaagaggaattacttatcgagaaagccacctgcaaaccatccgattttgttccatgatgcctcttcgttctattcctgccaaagtaatcgcagtactaggaatgcaagaaggagcttttccccgcgcaggctatcatacttcattgaatttaatggttgggcaagacaatcttgactataacccaaactctacagattatgatcgttatttatttttagaggctcttcaatctgttacagacgttttcatcgttagttatcaaggatatacctaccaagattccaaagtattgcagccaagtttgattattgaagagtttttcacctatttggataaatattatctcattcaaaataaaaaaatttctgaacaatgtgtaagtaaacatccatttgatgcatttgacgtctcttatttcaaaccaaattctattttaaataattactcacaattcgactatagaattgctgaacaatactaccaaactcataaaactccttctcatcgattacttaaacaatttattttaagtaactactctcttgaagatatccttccttctcacacagtgattgatttaaaaactttaaatacgttagttcgctcacctgttaaattttatttgaatagagggttagacatttatttggagggctatgaagatcggattattaaaaaccaagaagagcttggattatcagccttaaataaatatcagctcaaacaatttgcattaaaggaaccatttgaaaaagtgatgcagattgcagataaagaaggaaaacttcctttgggaatgttcaaaacagttgcgacaaaacgtttcaaagatgaaatagatgaagtgcatcaaagattgtataaacatggtattaatccttccgaactttttcaaatcgaattttgtactagttgttccgaaccttgccaaattcaaaaagatcaatggttacttccagctcttcaactgaattattctgatcaatatcaaatttctataattggaaagttgccctttgtttctaaaaaaggccttgttgttttaagtcaaggaagtggattttcagatgcttggaaagcatggccccaatttctgctttttaattatgctacaacttttaatattgaggcgattgaaagaaaccttattctttcaaaatcttcagaggtcaaaaaggctttttttaaagatagcattccttatttaaagcatttgattaattattatgcactatctatgcgcaatttttctccgctctttcctgattggattccttcccttattgaaggggatgaacaggcaattcaaaattacatgaaacaggtcttttcaaattcttttggagcttttttaaatcaagaattaaggtgggtttttaataaagaccatctaccttgcccgaaaattttaatcgaatcttggcaagagatcggtaaacaactagccggagatttgattcaattatggtatcctcctaaaaagaagaaaggggaagatgcatga

SEQ ID NO: 157213 - protein, 1195 aa, Candidatus Protochlamydia amoebophila UWE25
MFLLKFYVGFNKTVCKEGCKLLTLTVDTPKSEPFVSDLEVFFSNQLSILYEQLKNNLFGFKQTPFKKRLVIVYGPAMQTWLTLKMAQDPDLGIAAGIEFLYLNQAFETLIHYFQLKNEKIPSILELSLAIEKELLTVLQDYHRLSDEEQQDWLTLIYYLKLNSKQVGENLKLTRKMEKRLTGLSYHLAKIFQEYGKYAYSLVSKWEKSEHRGWQSRLWKSLFGGNQGWTYWTKAFQKTLKFFPECEVHFFSISFISKAEFQFLSKLANVAPIYYYLLSPCAVFWSDIRSDNETRYLQTYWQQKLGSKASQVLQLEELLRDRNPLLANFGKLGREMAYQIEESQATTHAGYILPSHVSELNDEIFFQEDLFLKESLQPLTLLHAIQADILMMRNPEGKPPFNFERKDDSIQLHIAPSIRREIQILYHNLLKLFEKDSTLQPNDIIVMAPQISDYVPYIQSVFGLEESQLDFQILDLGMQAQSEIVQGFFQLIRLSESRWEVSELLQLFGHRLFQRCHQLTQSDYYLIQEWIQQAGIRWGEDWLHRNELLQRHHCEKEMVDSSSVGTWNFGLTRLLLGLTTVVKSADSHSFDSIPCEGIDFSQAELMERWIRLLHSLRDDLSPLHDRSQMCMEEWSCYLSCLLDTYFKCEFEDSQSIADYEELKSQFKLLGDSAKTFKETKFSFQTIKFHLNNLLQQRGITYRESHLQTIRFCSMMPLRSIPAKVIAVLGMQEGAFPRAGYHTSLNLMVGQDNLDYNPNSTDYDRYLFLEALQSVTDVFIVSYQGYTYQDSKVLQPSLIIEEFFTYLDKYYLIQNKKISEQCVSKHPFDAFDVSYFKPNSILNNYSQFDYRIAEQYYQTHKTPSHRLLKQFILSNYSLEDILPSHTVIDLKTLNTLVRSPVKFYLNRGLDIYLEGYEDRIIKNQEELGLSALNKYQLKQFALKEPFEKVMQIADKEGKLPLGMFKTVATKRFKDEIDEVHQRLYKHGINPSELFQIEFCTSCSEPCQIQKDQWLLPALQLNYSDQYQISIIGKLPFVSKKGLVVLSQGSGFSDAWKAWPQFLLFNYATTFNIEAIERNLILSKSSEVKKAFFKDSIPYLKHLINYYALSMRNFSPLFPDWIPSLIEGDEQAIQNYMKQVFSNSFGAFLNQELRWVFNKDHLPCPKILIESWQEIGKQLAGDLIQLWYPPKKKKGEDA

SEQ ID NO: 157214 - DNA, 3399 bp, Erwinia carotovora subsp. atroseptica SCRI1043
  CDS (1)..(3399): transl_table=11
atgtttagaatctatcactccaatcagttggatatcttgaaaagactgatggttgagctgataaaacgtcagccgcttgtggatcctttccagcaggaagtgattttggtacaaagcccggggatggcgcagtggttgcaaattgaactggctacggactttggcattgctgccaatattcaattcccgctgcccggcgtttttttgtggaatatgtgtcgccatgtgctgccggatattccaaaagaaagcgccttcagcaaggatgcgatgacgtggaaactcatgcatttgctacccgatttgttggcacagcctgacttttcagcacttaaccactatttgcaggatgatgataaccagcgcaagttgcaccaacttgccggacgcgtggcggatcttttcgatcaatacctgatttatcgccctgattggattaaagcatggcaagaggggaaactggttgacgatctcggtggtaaccaactgtggcaatcggcgctgtggcgcgcgctggtggattacacgcgtgaactggcgcagcccgaatggcaccatgcgattctataccaacgttttattcgtgcattagagcatgcaaaaacatgtcctaaaggtctgccgccacgcgtttttatctgcggtatctccgcgttacctccgatctacttacaggcgttgaacgcactggcgcagcacattgatgtgcatctgttatttaccaatccctgccgccattactggagtgacattcaggattataaatttctggcgaagctaaaagcccgcaaccgccgcttacatcgctttgaccgcgagcagactgatgagactcgcccgctatttcgcgatctttcacaggcagaaacgctgttcaatgacgacggtaaacagtcgattaataatccgctgctggcatcgtggggcaagctggggcgcgataacctgtatctgctggccgaattggataacgttcaggaaatcgatgcctttgttgagtcggatggcgaaaacttactgcaaactttgcagcgcgacatccttgagttggaagatcatgcgatcgtagcggtaagccacgagacacagaacacaagcgctcagaaacgccgtctggaacccgatgaccgttcgattgattttcatgcctgccatagtccgcaacgtgaggttgaagtgcttcacgatcggctgttggccatgatggcagacgatcctgatctgatgccgcgcgatgtgatcgtgatgatggcggacatcgacagctataccccctttattcaggccgtgtttggcaacgcgccggacaaccgctatctgccttttgccatctccgatcagcgtgcgcgacatgcgcatcctgcgttgcaggcggtgatcagtctgttagatttgcccacaagtcgttttacggcggagcaggttttagcgttgcttgaagtccctgcgttggctgcccgtttcggtattcaagaagaagggctacggcgtctgcgcctatgggtggtggaatcgggcgtgcgctggggattggatgacgacaacgtacgcgatctgatgctaccgccaacaggccagcatacgtggcgttttggcctgacgaggatgctgctgggctatgcaatggatagccaggttggcgactggcagggcgtgctgccttatgatgaatccagcgggctgattgcggagctggctggtcaactggccgaactgctgatgcagattcatcaatggcgccagcgcctgtcccagccacgtttgcttgtcgattggttaccgttatgccgagagctgatcgaaaccttctttgatgcggatagcgagaccgaagcggcgctggcgctagttgaaaaacagtggcagcacgtgattggtatgggcacgatggcgtattatccgcaacaggtgccgatctctcggttacgtgatgaactgtcacggcgtctcgatcaagagcgactcagccagcgttttctggccggtgctatcaacttttgtacgctgatgcctatgcgttccatccccttcaaggtcgtgtgtttactgggcatgaatgatggcgtttaccctcggacgctgccaccacttgggttcgatctgatggggcggaaaatcaagcgcggtgaccgtagccgacgtgacgatgaccgctatctgtttcttgaagcgctcctgtcggcacagcataaactttatatcagctatatagggcgctctattcaggataatacgcgccgctatccttcagtattggttagcgaactgacggaatatatcgcgcagagctatgtcctgccgggcgatgaagcgctggatatcgatagcagcgcggaatgcgttgtaaagcacctctgccgtgagcatagccgtatgccttttgatgcgcataacttcttgcctacaccgcagccgttaagttttgcggcagagtggctggcggcggcgaatcgaaaaggggaagcccagcctgattttgatcgtgaagcgctgtccgaaagatcaagtgatagcgatgtcagtttggacgatctgaagcgtttttatcgccaccctgtgcgagccttttttcaactgcggcttggcgtgagttttatgctgcacagtgacgaactattggatgaagagccttttgtggttgatagcctcaaccgctatcaattgaatagcgagctgcttaataccttgattaatgaaggcgatacggaaaagctgtaccgtcgcgccagatctgcgggcgaattgccctacggcgcgtttggcgaaatttactggcaggaacagcagcaggatatggcgcagctagccgcgcgtgtgcgtgatgaattaacgccgtcgctgtcggtgagccgggaagtggatatcctccttgatggcgtgcgcgttagcggctggctgaatcaggttcagccggatggtttgctgcgctggcgtcccggtacgctttccatgaaggatggcattacgctgtggctggaacatctggcctattgtgcaacgggtgggcagggggaaagtcggctgtatgggcgggaagacaccgcgtggcgctttgccgcgttgtcggaagcgcaggccagagaacatctgagcgttatgctggatggatatcgtcagggaatgagcaagccgctgttactgctcaataaagcagggagcgcgtggctggctgaatgttatgatcgtgaaagtgatagcctgcggtcagatgaagaggcgcagaataaggcgcgcgcccgcttgctgcaagcctggcagggcaacatgggaatgcggggggaaggtgaggattattacctgcaacgcattattcgtgagttggatgaaaaacgaatgaatgaggtgattgaagcggcgcaaatctggctactgccaccgttccgctctaatctggcttga

SEQ ID NO: 157215 - protein, 1132 aa, Erwinia carotovora subsp. atroseptica SCRI1043
MFRIYHSNQLDILKRLMVELIKRQPLVDPFQQEVILVQSPGMAQWLQIELATDFGIAANIQFPLPGVFLWNMCRHVLPDIPKESAFSKDAMTWKLMHLLPDLLAQPDFSALNHYLQDDDNQRKLHQLAGRVADLFDQYLIYRPDWIKAWQEGKLVDDLGGNQLWQSALWRALVDYTRELAQPEWHHAILYQRFIRALEHAKTCPKGLPPRVFICGISALPPIYLQALNALAQHIDVHLLFTNPCRHYWSDIQDYKFLAKLKARNRRLHRFDREQTDETRPLFRDLSQAETLFNDDGKQSINNPLLASWGKLGRDNLYLLAELDNVQEIDAFVESDGENLLQTLQRDILELEDHAIVAVSHETQNTSAQKRRLEPDDRSIDFHACHSPQREVEVLHDRLLAMMADDPDLMPRDVIVMMADIDSYTPFIQAVFGNAPDNRYLPFAISDQRARHAHPALQAVISLLDLPTSRFTAEQVLALLEVPALAARFGIQEEGLRRLRLWVVESGVRWGLDDDNVRDLMLPPTGQHTWRFGLTRMLLGYAMDSQVGDWQGVLPYDESSGLIAELAGQLAELLMQIHQWRQRLSQPRLLVDWLPLCRELIETFFDADSETEAALALVEKQWQHVIGMGTMAYYPQQVPISRLRDELSRRLDQERLSQRFLAGAINFCTLMPMRSIPFKVVCLLGMNDGVYPRTLPPLGFDLMGRKIKRGDRSRRDDDRYLFLEALLSAQHKLYISYIGRSIQDNTRRYPSVLVSELTEYIAQSYVLPGDEALDIDSSAECVVKHLCREHSRMPFDAHNFLPTPQPLSFAAEWLAAANRKGEAQPDFDREALSERSSDSDVSLDDLKRFYRHPVRAFFQLRLGVSFMLHSDELLDEEPFVVDSLNRYQLNSELLNTLINEGDTEKLYRRARSAGELPYGAFGEIYWQEQQQDMAQLAARVRDELTPSLSVSREVDILLDGVRVSGWLNQVQPDGLLRWRPGTLSMKDGITLWLEHLAYCATGGQGESRLYGREDTAWRFAALSEAQAREHLSVMLDGYRQGMSKPLLLLNKAGSAWLAECYDRESDSLRSDEEAQNKARARLLQAWQGNMGMRGEGEDYYLQRIIRELDEKRMNEVIEAAQIWLLPPFRSNLA

SEQ ID NO: 157216 - DNA, 3171 bp, Desulfotalea psychrophila LSv54
  CDS (1)..(3171): transl_table=11
atgttgcatcttcatatatctaaccacaccgaaaagcttctcgaaatcttagcggccattattaaaagagagggccgcgccaatctctttgccagagaaatttttttaattcagagcccgggggtggagaggactgtctgtcagtatctggccgatgagtttaagagctggtgtaattttgattttctcttgcctgctggtttgttgcgaaaaatagcctcaagcctctatgttgatcttgaaacagatctctttgccagccagacgaccgtctggcgacttgaggccctgttgcgggatattgatgaggatatttatctgcccttgaaaaaatatgtaagcggcgaggtggcggagctgaaaagatatcaacttgccggtcagatagctcagctctttgatcagtatcagctgatgcgtcccagcatgcttgcccgttggcgacttggccagagggtaacggaggaggattgcgaaatatggcagatgcatctctggcagagactggtggaggagttccccgctgcccggcatcagggagagatcttagaaaatattattgaaacattggaaaaagaagagtgccaacgtcgtctgcccaggcggatctttgtctttggactccataccatggccccgctctttttaaagttcctgcaggccctgtcctcccggaccgaggtgcatctctttctcctctccccctgcagagaatattggggtgaggtggggaggggaggcgatcgtcttctctctctggagggcataagggattcgggtgtcgatctctcttcctatgaggaggaagagcctcagcagttactggcctctcttggtcggcagggccgggattttcagcagatgctggtggcgtccgctggttatagtatagactctgccctctatcagggcttaggtgctggctctcccccctctcttctccacgtcctacagggggatattttagagaggggcagactggcggttacggcagcaagagacgattcccttcgcattgtctcctgccattcgcctctgcgggaacttgctgtgctcaaggatcatattcttgacctgctctataaggatgccagcctgcagctacgggacattgtggtgatggcccctgatattcaggagtatgccccgctcattcccgccctcttcgctgacattcagtactccatagccgatcgtgccacgggacagcgcaatacggtgatggctgtctttcttgattacctcaacctcttctcgggaaggttcggttggagtgaggttcttgatctgcttcgttcggagcatatttattcccagtttagccttggtgagggggattttgatctcctgcagaagtgggtgacagaatccggtattcgctggggactttcagcggagcagaggcaggagctcggcctacctcccctggagctgaatacctggttggctggcttgcagaggctgctcctgggctttgccatgtccgccgataccatggtggagggggttttggcctacagcgatatcgagggcaatagtgctcaggcacttggcggtctttgcgaatttcttcaggtgttacaggggggacaagagctctataccactccacgtcttctccatgagtgggcagagttgctccagggggatgcggagcgtctctttggcggtgaagaaaattctgcccatcaggaactacagcagattctggcagggcttggccggggcagggagtatcagggcgtccttctctacagtcagcccattgcctttcaggtggttatggcctggctccagcaggcctctgcccaggttggttccagtgcaggctttctccgggggcagttgaccttctgttctatgttgcccatgcgctctattccctttcgggtgatctgccttttggggcttaacgagggtaagtttcccaaacaggataagcaggcgacctttgatctcctcgccagcaaacccgagctgggtgatcgctcgccaagaattgacgatcgttatcagtttcttgaggccctgatctccgtgcgtgactctctctatctgagttatgtggggagatcgataaaaaataatggcgagattcctccctcggttgttctctgtgaactgcttgatctgctggagtgtaaatttgccattaagcctgaggatattgtggttgaacagcccctccatccctttagttcaaaatattttgaagggagagctgacctctttagctataacgagaactgtcttaccctggcccaaaagatctatggtggtggtggcggggaggagcgtccatggtggtcggggaacctgggacgacctcaggagaacatctacctggccgatatggtctctttttacaagaacccccaacgttggtttgtgagcagaagtcttgagattcgtctgggtgccagttcggatctacccgacgatacagagaccttctctgcctcgggccttgatcgttatctgttggaacagggtttggtagaggatctgctggcaggtagagaggtggcagatatctatcatggtctggccatagaggggcgctggccccaggggactccggggagcctcctctttaaaaaactcctgacagagttggacgaatttaccaacagcattcgtcagatagatcccggcccgattatccagacccttcccattgatcagcgtattggcccctatcgtcttttggggaaggttgccctgcgccagaatgggatttttctccatcgttatgccaatcgtaagggcaaagatctacttgaggcatggttatatcatctggtggcgggaagggagcgaccggatattatcacctggctggtctgtaaggatggggtgctgaaattttcagaacagccgtccgaggagatgctccttctctatctggagcactttgcctttggtgttaataccctctcctcctttcaagttgaggcggcctatgcctatagtttgcactgtcaaaagaagagtaagaagacaccgatgcaggtagccgaggagaccttgaaggggagcgtgacaaaggggtatgaacccgagctggcccttgccatcagcggtggagtggaggagtttttggcgggagaatttgaacgatactgtatagagctgatgttgcctatttgggagtacgccgatgagttataa

SEQ ID NO: 157217 - protein, 1056 aa, Desulfotalea psychrophila LSv54
MLHLHISNHTEKLLEILAAIIKREGRANLFAREIFLIQSPGVERTVCQYLADEFKSWCNFDFLLPAGLLRKIASSLYVDLETDLFASQTTVWRLEALLRDIDEDIYLPLKKYVSGEVAELKRYQLAGQIAQLFDQYQLMRPSMLARWRLGQRVTEEDCEIWQMHLWQRLVEEFPAARHQGEILENIIETLEKEECQRRLPRRIFVFGLHTMAPLFLKFLQALSSRTEVHLFLLSPCREYWGEVGRGGDRLLSLEGIRDSGVDLSSYEEEEPQQLLASLGRQGRDFQQMLVASAGYSIDSALYQGLGAGSPPSLLHVLQGDILERGRLAVTAARDDSLRIVSCHSPLRELAVLKDHILDLLYKDASLQLRDIVVMAPDIQEYAPLIPALFADIQYSIADRATGQRNTVMAVFLDYLNLFSGRFGWSEVLDLLRSEHIYSQFSLGEGDFDLLQKWVTESGIRWGLSAEQRQELGLPPLELNTWLAGLQRLLLGFAMSADTMVEGVLAYSDIEGNSAQALGGLCEFLQVLQGGQELYTTPRLLHEWAELLQGDAERLFGGEENSAHQELQQILAGLGRGREYQGVLLYSQPIAFQVVMAWLQQASAQVGSSAGFLRGQLTFCSMLPMRSIPFRVICLLGLNEGKFPKQDKQATFDLLASKPELGDRSPRIDDRYQFLEALISVRDSLYLSYVGRSIKNNGEIPPSVVLCELLDLLECKFAIKPEDIVVEQPLHPFSSKYFEGRADLFSYNENCLTLAQKIYGGGGGEERPWWSGNLGRPQENIYLADMVSFYKNPQRWFVSRSLEIRLGASSDLPDDTETFSASGLDRYLLEQGLVEDLLAGREVADIYHGLAIEGRWPQGTPGSLLFKKLLTELDEFTNSIRQIDPGPIIQTLPIDQRIGPYRLLGKVALRQNGIFLHRYANRKGKDLLEAWLYHLVAGRERPDIITWLVCKDGVLKFSEQPSEEMLLLYLEHFAFGVNTLSSFQVEAAYAYSLHCQKKSKKTPMQVAEETLKGSVTKGYEPELALAISGGVEEFLAGEFERYCIELMLPIWEYADEL

SEQ ID NO: 157218 - DNA, 3504 bp, Mannheimia succiniciproducens MBEL55E
  CDS (1)..(3504): transl_table=11
ttgcagttaaaaataaactcactgaaaataaccgcactattggttattaggaaatttattgtgtttacggtttaccattcgaatcgacttgatgttcaaaaagacatcttaattgaattaatgcagcttttgccgccggacgatccttttcaaactgaaattattcttgtgcaaagccccggtatggcgcagtggttgcagctgaaaattgcagaaaaaaaaggtattgccgctaatctcaaatttcctatgccggcaagctttatttggcagcaatatatcaatgtattagaagacgtaagccaacagacacaatttaacaaagatgccatgacctggcgtttaatgcagctaattccgcaatttctttccgaaccctgctttcaggcgttagaaaattatctgaaaaattcaccgtactccgaacagcaaaaattatatcaattagcccgtaaagtagctgatcttttcgaccaatatttagtttaccgtccaaattggattcatgcctgggaaaataatcagccggaatcaattgagcaggctatcggtacctatcaaaaagacgataatcctgaattaattacacaaatcaaacgggatattaagtggcaagggattttatggcgtgcgctaattgatgaagttcagcgcggggcgggttataaagtgcgccaccgggctaatttacatcaggcgtttattgataaattacgcagcgctaaaccggaaaatttgccgcagcgaatttttattttcggtatttccgctttgcctcaatcttatttggaaacttttgaggcaatgagtcggtattgtgatattcatttgttttttaataatccgagtcgcgaatattggggtgatattgttgatgatcgttttttacagaaattgcaaacccgccaacggtttgaccattatgaaaataatcataccgcattgctaagttcggcaaccttgacgaatatgcaacaagaaaattacgagttttctccggataacgaaaaactgctggttgggaatccgctgttagccggttgggggaaattgggtcgggatttcttctatttattaacggatttaatgactcgagcggaagaacataatcgggaaattatcgcttttgtagatcttgacgacaaaaccttgctatctcaggttcaaggtcatattttggatttaattcctatggcggtaaaaaaactgaataaaccgcaagaagataattcactgaccattcacgcctgtcacagcgttatgcgcgaagttgaggttctgcatgattatttattatcccttttcgaattggataaaaatcttaccccgaaagatattgtggtaatggttgccgatattgataaatatgcgccttatattcaggcggtcttcggacaatatcaaaaagatttgcaaactaaccaattttatcaagcggataagcgttatattccgttttcaatctcagacaataaattgactgaaagtgatgtattaatcgcctcgtttctcatgttattgaatttaaaagaaagccaattcagtgctgaagaagtgctggcttatttggatattcctgctatccgtatgcgttttcagattgaattggaagacttagaaactattcgggaatgggttaaaaattcaggcattcgcttcgggttggaaaagcgaactgataatagtcttaaaaattataatgcctggcaatcgggattagagcgaatgctgcttggttatgctatgcgcgcggaaaacggtatttggcaggatagcctaggctttgacgacagtcacggcttgcaaggcaaacttgcaggattactggctgcttttatcgagcggctttaccaatggcaacaattcttgcgtaaccctcatagttatgaagaatggggtcaagcactgctggaattggtagatcattttttcttggagaatgagcaaagcctcgaagcgatactttatcttaaagagatcattcaacaacttcatgaacaattagacgaagtcaattttaccagtaaactggaaattgacgttattgccgaagtgatggcagagcagttaaacgataaaaatacgagtctgaaatttttagtcggaaaagtgagtttttgcacgttgctgcctatgcgggcaattccgttcaaagcggtttgtttactgggcatgaatgacggcgagtatccgcgtcagcaaacgccgaatagttttgatttaatgcaatatcatcgtcaaaaaggcgatagatttcgccgtgatgacgatcgttatttatttttagaagccttactggcggcggaaaactatttttatgtgagttatgtggggcaatccatcattgataatcagcaaagagagccttcggtgcttgttagtcagttattggattatttggcggaaaatttagcgaataacgacgaagaaatcgaacaaatccgcacaagtttagttcaatatcattcaatgacgatattcagccctgataatttttctgcaatgcatcgttcttatgcaaaagaatggctgccgttagttaatcgtaatcaatatcccgtgcctgattttacccaacagattagcggtgaaattgatgaagtgagggaaatcgatattcttcagcttgtacagtttgtacaacatccggtgaaattcttttttgagaaacggttgggcgtttattttcaacaaacggacgagcaaattccggaaacggaaaatttcactttggataatctggacaattttttgataaaagacgaattgattcgttttgccgatgatgaaaccgacaactatttcgaacgcctgaagctggagggtattttgccttacggtcattttggtgacatttataagcgacgattgcaaaatgaagccgcggaattaaaaaataagattagcgcttatttaagtcaggagcccgctcatcagtttgtcgaaattacattagatatgggtgaacaaagcgttttactcaccggacatttagaccatctttatcagccttttgcacaacgggtaaaatggcgggtcggcgaagtgaaagataagcatattattgaaaactggttatattatttgctgcaactttgcaccacggataatgttaatccgcctttatattatggcaaaaacggttgtatcggtttcaaaactttggaaaaatccaccgcactttccatacttaaattatatgttaaagcctatttgcaggggctaaaacaggtacaaatcgtaccgacatataaaattgacgattatttaaaatcctgtcaaccggaaaccgaatttgacacgttgtccgcctttaataatttgcgcgatttatttaaatcatcaaacaattataccaatgaaaaagaagacatttattggacccgcgtatttcaacaggcaacggaattaaattcagacaaagaaaaattaatgcaaatccaacaaacaacccgggactggttcggtttaatgctgaattcggtggaaaaggttaaactttag

SEQ ID NO: 157219 - protein, 1167 aa, Mannheimia succiniciproducens MBEL55E
MQLKINSLKITALLVIRKFIVFTVYHSNRLDVQKDILIELMQLLPPDDPFQTEIILVQSPGMAQWLQLKIAEKKGIAANLKFPMPASFIWQQYINVLEDVSQQTQFNKDAMTWRLMQLIPQFLSEPCFQALENYLKNSPYSEQQKLYQLARKVADLFDQYLVYRPNWIHAWENNQPESIEQAIGTYQKDDNPELITQIKRDIKWQGILWRALIDEVQRGAGYKVRHRANLHQAFIDKLRSAKPENLPQRIFIFGISALPQSYLETFEAMSRYCDIHLFFNNPSREYWGDIVDDRFLQKLQTRQRFDHYENNHTALLSSATLTNMQQENYEFSPDNEKLLVGNPLLAGWGKLGRDFFYLLTDLMTRAEEHNREIIAFVDLDDKTLLSQVQGHILDLIPMAVKKLNKPQEDNSLTIHACHSVMREVEVLHDYLLSLFELDKNLTPKDIVVMVADIDKYAPYIQAVFGQYQKDLQTNQFYQADKRYIPFSISDNKLTESDVLIASFLMLLNLKESQFSAEEVLAYLDIPAIRMRFQIELEDLETIREWVKNSGIRFGLEKRTDNSLKNYNAWQSGLERMLLGYAMRAENGIWQDSLGFDDSHGLQGKLAGLLAAFIERLYQWQQFLRNPHSYEEWGQALLELVDHFFLENEQSLEAILYLKEIIQQLHEQLDEVNFTSKLEIDVIAEVMAEQLNDKNTSLKFLVGKVSFCTLLPMRAIPFKAVCLLGMNDGEYPRQQTPNSFDLMQYHRQKGDRFRRDDDRYLFLEALLAAENYFYVSYVGQSIIDNQQREPSVLVSQLLDYLAENLANNDEEIEQIRTSLVQYHSMTIFSPDNFSAMHRSYAKEWLPLVNRNQYPVPDFTQQISGEIDEVREIDILQLVQFVQHPVKFFFEKRLGVYFQQTDEQIPETENFTLDNLDNFLIKDELIRFADDETDNYFERLKLEGILPYGHFGDIYKRRLQNEAAELKNKISAYLSQEPAHQFVEITLDMGEQSVLLTGHLDHLYQPFAQRVKWRVGEVKDKHIIENWLYYLLQLCTTDNVNPPLYYGKNGCIGFKTLEKSTALSILKLYVKAYLQGLKQVQIVPTYKIDDYLKSCQPETEFDTLSAFNNLRDLFKSSNNYTNEKEDIYWTRVFQQATELNSDKEKLMQIQQTTRDWFGLMLNSVEKVKL

SEQ ID NO: 157220 - DNA, 3345 bp, Burkholderia pseudomallei K96243
  CDS (1)..(3345): transl_table=11
atgctccatctcttctactcgaaccgccacgaaacgctggccgacgcgttgctcgacgatctcgccttcgcgtcggacggcgcgggcccctgggccgcgcagcaggtgatcgtgccgagcgcggcgctgcgccggcggctcgagctcgacctcgcgaagcgccacggcgtgtgcgcgaacgtgcgcttcagctatctcgcgcaatggctgtgggcgcagatcggcgaagtgctgacggtgcccgcgcattcgccgttcgcgcccgatcgcctggtgtggcgctgctaccggctgctgtcggaccacggcgccgcgccgtggcgcgcatcgccgcggcttgccgcctatctggccgcggccgacgcgccgatgcgccacgagctcgcgcaccggatcgcgacggtgttcgaccactatctgacgtatcgtccggagtggctcgcgcaatggcaggacggcgaatcgatcttcgcgctcgaaggcgcgccgcgccacggcggcgaggccgcgcgcgacgacgaggcgtggcaggccgcgctctggcgcgcgctgctcgcggagctgtccgacagcggcatgccgcccgcgcaccggttcctgcgcgaggcccgcgccttcgatcccgatgtgatcgcgcgcgcgcgggcgaagtggccggatgcggtcagcgtgtttgcgttgccgacgatgccgccgctgcacatcgcgctgttgcgcgagctgtcgcgctggatcgacgtgcgcatctacgcgctcagtccgtgccgcgaattctggttcgacatcgtcacggccgcgcgcgcggagtcgctcgacgcggcggaccggctcgactatcaggaagtcggccatccgctgctcgccgaatggggcaggcagacgcaagcgcaactgcacatgctgcacgagctgaccgagagcgcggcggcgagcgatgcgtcgcgctacgcggacaatcccgcgccgacgtggctcgcgcgcgtgcagaacgcgatcctcgatctgcagccggaggctgcgctcggcgagccgcccgccgagcgcggcgtcgaagtgcacgtgtgccacagcctcgcgcggcagctcgaggtgctgcatgatcgcctgctcgcgtggttcgacgcggacccgaacctcgcgccgtcggacgtgctcgtcgcgatgccggatctcgcgacggcggggccgctcatcgacgcggtgttcggcacgcctgcgggcgccgacgccgcgcgcatcccgtactggatcaccggcctgccgccgtcgcaggcgaatcccgtcgcgcgcgtgctgctcgattggctcgcgttgcccgagcgcgacgtcggcgcgccggagctcgtcgaatggctgcgcgccgacgcggttgccgcgcgctatgggatcgacgcgacggcgctcgaaaccgtgcagacctggctggccgcatcgggcgcgcggcgcgggctcgcgcccgatgcggccgagccgccgaacccggccgtgcccgcgccgcgccacacgttcgccgacgcgctcacgcggctctttctcggctacgcgatgcccgatggcgcggcgcccgtttcgacgtggctgccgatcgcgggcgccgagggcggcgaagccgagctgctcggccgcctcgcgcgcttcaccgacgacctcgacggtttcgcgcggcgcatcgcccgcgacctcacgccgcaaggctggggcgatgtattcgccgatgcgctcgcgcgcttcttcgattcggggccggcgttcgccgacgcgctgtccggcgtgcgcgacgcgctcgacgcgatgcttgccgcgatggcggaaggcgcggcgggcgcggcgttgcccgccgcggtcgtgcgcgcgggcctcgcggccgcgctcgacgatccggcgcgcggcggcgtgccgtggggcggcgtcacgttctcgtcgctcacgagcctgcgcgggctgccgtatcgcatcgtgtgcctgatcgggatggacgacggcgtgctgccgagcctcgcgcgcgcggacgagttcgacctgatggccgtgttcgcgaagctcggcgaccgccagcggcgcgacgacgagcgcaatctgttcctcgatctgctgcttgccgcgcgcgagcgcctgctgatcgcatacacgggccgcagcatccgcgacaacgcgccgctgccgcccgcggcgctcgtcgacgaattgctcgaccatctggccgccgcgtcggccggcccggacgcgccgcccgacgcggtcgacgccgcgcgccgcgcgttcgtgatcgagcatccgctgcaaccgttctcggccgaatacttcgcgccgggcggcgcgctcttcacgtacgacgcgtcgcgcgcgacgcttgcgcgcctgctcgccgagggcgcgcgcgcgcaggcgcgcccgttcttcgccgcgccgctgccggccgagcccgagcagccggtcgcgttcgccgatttcgagcgcttctggcgccatccggcgcgttcgctgctgcgcgctcggctcggcatcgtactgttggacgcgcaggcggaactcgtcgacaccgagccgttcgagctcgattacgcgggcagcgacgcgctcgccgagcgcgtgctgccgctgttgatcgagacggccgacgcggccgcgttcgagcatgcgctgcgcgtcgccgacgcgagccccgaggtgccgggcggcgcgacgggcgcggtgcggcgcgaccatgcgctcgacgcgctcgcgcagctcgcgggcaacgtgcggcgcgcgctcgccgacggcgcgacgcgcgtgccgttcgcgttcgacgtcgcgcccgcatggcccgcggcgagcgacgcgcggtggttcggcgagcacgacgcggcgctcgccgcggcggcgacgcgcgagccgctgcgcctgcacggcgcgctcgcgcggctgacggcggcggggcaggtgatctaccgctatgcgcggccgggggcgcgcgattacctcgccgcgtggctcgcgcatctcgtctattgcgcgatcgaccccggcgggccgcgccgcacactatggttcggctccggcgacacgttcgaattcgcgcccgtcgccgcgccgctcgagcagctcgcgccgctcgccgcgctgtttcgcgccgggcggcggatgccgctcgcgtttttcccgaggagcgcgtgggcgctcgtatcggagagcgaatcgaaggcggcgggcgtgtggatcaacgatcgcgtcgcgggcgaggccgacgacgcgtcgctcgcgctcgcgtggcgcggcgcgaacccgtcgctcgacgagccgttcggcgcgctcgcgcatctcgtgttcgatccgctcgtcgagcatctgcggagggcgtcatga

SEQ ID NO: 157221 - protein, 1114 aa, Burkholderia pseudomallei K96243
MLHLFYSNRHETLADALLDDLAFASDGAGPWAAQQVIVPSAALRRRLELDLAKRHGVCANVRFSYLAQWLWAQIGEVLTVPAHSPFAPDRLVWRCYRLLSDHGAAPWRASPRLAAYLAAADAPMRHELAHRIATVFDHYLTYRPEWLAQWQDGESIFALEGAPRHGGEAARDDEAWQAALWRALLAELSDSGMPPAHRFLREARAFDPDVIARARAKWPDAVSVFALPTMPPLHIALLRELSRWIDVRIYALSPCREFWFDIVTAARAESLDAADRLDYQEVGHPLLAEWGRQTQAQLHMLHELTESAAASDASRYADNPAPTWLARVQNAILDLQPEAALGEPPAERGVEVHVCHSLARQLEVLHDRLLAWFDADPNLAPSDVLVAMPDLATAGPLIDAVFGTPAGADAARIPYWITGLPPSQANPVARVLLDWLALPERDVGAPELVEWLRADAVAARYGIDATALETVQTWLAASGARRGLAPDAAEPPNPAVPAPRHTFADALTRLFLGYAMPDGAAPVSTWLPIAGAEGGEAELLGRLARFTDDLDGFARRIARDLTPQGWGDVFADALARFFDSGPAFADALSGVRDALDAMLAAMAEGAAGAALPAAVVRAGLAAALDDPARGGVPWGGVTFSSLTSLRGLPYRIVCLIGMDDGVLPSLARADEFDLMAVFAKLGDRQRRDDERNLFLDLLLAARERLLIAYTGRSIRDNAPLPPAALVDELLDHLAAASAGPDAPPDAVDAARRAFVIEHPLQPFSAEYFAPGGALFTYDASRATLARLLAEGARAQARPFFAAPLPAEPEQPVAFADFERFWRHPARSLLRARLGIVLLDAQAELVDTEPFELDYAGSDALAERVLPLLIETADAAAFEHALRVADASPEVPGGATGAVRRDHALDALAQLAGNVRRALADGATRVPFAFDVAPAWPAASDARWFGEHDAALAAAATREPLRLHGALARLTAAGQVIYRYARPGARDYLAAWLAHLVYCAIDPGGPRRTLWFGSGDTFEFAPVAAPLEQLAPLAALFRAGRRMPLAFFPRSAWALVSESESKAAGVWINDRVAGEADDASLALAWRGANPSLDEPFGALAHLVFDPLVEHLRRAS

SEQ ID NO: 157222 - DNA, 3417 bp, Methylococcus capsulatus str. Bath
  CDS (1)..(3417): transl_table=11
ttgccatcccccctcaacatctttttctccaaccgcttcgaaatcctgactcagcgcctgttcgacgatctggcgcaaggaccggccgatccgttcgtggcggagcaagtcatcgtccccagcctggcggtccggcgccggctggagctggatcatgcggatcgcttcggggtgtgcgcaaacgtggagttcagttatctggcgcactggctgtgggtgcagatcgggcaggtgatcgaggtgggggcatcctcgccgttcgcgccggccaccctgacttggcgggtgttccggatgttgggcgaggaagccctggtgtcggcgcatccgcggctgaagtcttatctggcgcgggccgacggggcgatgcgcttcgatctggcgcagcgggtggcgcatttgctggaacagtacctcacctaccgcccggactggctggcggcctggctggaaggcaggccggcttccggattgccggaggcgagccgggaagacgaggcatggcaggcggcgttttggcgtacgctggtagatgagctggaggtgcggcgtgaacacccctcggcggcattcttccgggcggtagaagccatggggccggaggcgacacggcgggccgggctgccggcgcgggcccatctgttctgcctgccgaccatccccccgttgtatctggacatcctcggcaagctggcgcgctggaccgagctacatttgtacgtgctgaacccttgccgggaatattggttcgacatcgtcgatcccaggcggctgaactatctggaggttcggggtgatgcgctgtaccgcgagaccggtaaccgcctgctggcgaactggggacagcagacccaagcgcacatcgacctgctgttcgacaaggcggaaggggcggtgatcgatgatgcccagttcgagccgccggcccggatcagcctgctggcggcggtgcaggaggccatcctcgatctgcgcgatcccgagccgggctgttgcgcgtctgtggcgggggaccgcagcatcgaggttcatgtctgccattcgctggtgcgggagctggaggtgttgcatgaccagttgctggcgctgctggcccggcccgatgcacccaaggtctcggatatcctggtcgtgatgccccgcctggaggaggctgcgcctttgatcgacgcggtgttcggcacggcgccggcggcgcggcggattccttatgccatcaccggtttgcgcaggacggtggcgaatccggcggccgccgcattgctgaccctgctcggactgtttgcgtcccgctgcaaggccagcgcggtgtatgaatttttgcagcgcccgttggtgcatgcccgcttcggtctggggctggacgatctggaatgcatccacgattggttccaggcggcagggatccggtgggggctgaatggcgcgcaccggaaggcggtggggctgccggaggtggagcggcatagcttctgcgacggcctcgaccggctgtttctgggctatgcactgggggacgttccggtgcagttcgatggtcgcctgccggcgggcagccctgagggttcggaagcgctggcactgggcggattcgcccatttcgtcgatctgctgactcattggcatcgcgtctggagcacgccggcgacggcccagacctggggcgagcggctgaacgcggtggtcggggccttcctgatggagacgcccgaaaccgttcctgatctccaggaggtccgcgaagccatcgccgcgctgagccggcattggggcgaggccgccgtaaccgggacgatcgagcctgaagtggtgcgggttgctctagaatcgctgctggacgatccagcccggggtgggactccttccggtcggctgacctttaccgccatggccagtctgcgcagcctgccttaccgggtggtgtgtgtcatcggcctgaatgacggcgagtttccccatccggaccggcctgcggaattcgatttgatcgcccaggccccgcgtcgcggtgaccgccagcgacggtacgacgagcgcaacctgtttctcgacctgctgctggcggcccgcgagcggctgtatctgagctataccggccgtagcgtgcgcgacaacgcccccctgccgccgtcgacactgctgtcggaattgctggactacctgcttccgttggtggccgctgcgggagagagtccggaggaggcgcggcgccggctggtggtggagcatccgctgcaggcgttctcgcccgtgtatttcgatgccgccgtggcaaaggatccgcgactggtcagtttcaattcggaatattgcgaagctttgcgggccgctcgttcccctcgtccttcgggggagggggtgagggcttgtgaatcccactcgcaagagcctgaagaatgttccgccatccttgccgagagggagcgggcggaccacggtccagcggggccaatcgccggggaggagcagaatgatccggacttcgaacatgcccctttcttccccgccccaatggccgcaccggagccggaatggcgtgagccgaacctggacgtcttgaagcgcttcttccgcaacccctgccgctatctgctggagcaacgcctggggttgaccctggccgagggcgaggcggagctggccgacgacgagccgttccttcccgcttacttcgcccggggcgaggtcgccgagcggctgctgccgctgatgctgtccgctgccacggaggaggcggtcgaggtcgtggcgcgggcggggatcgagtttccgcaggggcagctcggtgaactgctgctcaaaggggagttgacgcggatacgggagtacgcggagcggatcgccggacagacgcaggaggagccgctgcagccgctgccgggtaggctggctttccagatcgagggcgaaacctggactttgagcggcgcgctcggccaggtgtggcggcgcgggctggtgcgctggcgctacgacgacacccggccggtggattatctgtccggctggctggatcatctgttcctgaatgcgttggcggtccgcggggtggagccgaccacgacctggatctcacgggacggcgaataccggctccggccggtggccgcagcccaggaacgattgcgcgaactggtggcgctgtaccgggagggactccgcttgccgctgcatttcttccccaggagcgcctgggcctgtgccttggggctgaaacagggcggatcccaggctgccgagcggcaggcgcggaagcgctgggagggttccggtgaccgccgcggcgaatccgaagacctcgcctaccgccaggcactgagagggcaggccgatccactggacggtgcgttcttccgcacggtccgaacggtgttcggtccgctactggatcatctggaagacgggcgcatcgcatga

SEQ ID NO: 157223 - protein, 1138 aa, Methylococcus capsulatus str. Bath
MPSPLNIFFSNRFEILTQRLFDDLAQGPADPFVAEQVIVPSLAVRRRLELDHADRFGVCANVEFSYLAHWLWVQIGQVIEVGASSPFAPATLTWRVFRMLGEEALVSAHPRLKSYLARADGAMRFDLAQRVAHLLEQYLTYRPDWLAAWLEGRPASGLPEASREDEAWQAAFWRTLVDELEVRREHPSAAFFRAVEAMGPEATRRAGLPARAHLFCLPTIPPLYLDILGKLARWTELHLYVLNPCREYWFDIVDPRRLNYLEVRGDALYRETGNRLLANWGQQTQAHIDLLFDKAEGAVIDDAQFEPPARISLLAAVQEAILDLRDPEPGCCASVAGDRSIEVHVCHSLVRELEVLHDQLLALLARPDAPKVSDILVVMPRLEEAAPLIDAVFGTAPAARRIPYAITGLRRTVANPAAAALLTLLGLFASRCKASAVYEFLQRPLVHARFGLGLDDLECIHDWFQAAGIRWGLNGAHRKAVGLPEVERHSFCDGLDRLFLGYALGDVPVQFDGRLPAGSPEGSEALALGGFAHFVDLLTHWHRVWSTPATAQTWGERLNAVVGAFLMETPETVPDLQEVREAIAALSRHWGEAAVTGTIEPEVVRVALESLLDDPARGGTPSGRLTFTAMASLRSLPYRVVCVIGLNDGEFPHPDRPAEFDLIAQAPRRGDRQRRYDERNLFLDLLLAARERLYLSYTGRSVRDNAPLPPSTLLSELLDYLLPLVAAAGESPEEARRRLVVEHPLQAFSPVYFDAAVAKDPRLVSFNSEYCEALRAARSPRPSGEGVRACESHSQEPEECSAILAERERADHGPAGPIAGEEQNDPDFEHAPFFPAPMAAPEPEWREPNLDVLKRFFRNPCRYLLEQRLGLTLAEGEAELADDEPFLPAYFARGEVAERLLPLMLSAATEEAVEVVARAGIEFPQGQLGELLLKGELTRIREYAERIAGQTQEEPLQPLPGRLAFQIEGETWTLSGALGQVWRRGLVRWRYDDTRPVDYLSGWLDHLFLNALAVRGVEPTTTWISRDGEYRLRPVAAAQERLRELVALYREGLRLPLHFFPRSAWACALGLKQGGSQAAERQARKRWEGSGDRRGESEDLAYRQALRGQADPLDGAFFRTVRTVFGPLLDHLEDGRIA

SEQ ID NO: 157224 - DNA, 3369 bp, Azoarcus sp. EbN1
  CDS (1)..(3369): transl_table=11
atgctctcgctcgccttctcgaaccgctacgaagtgctcctcgaaacgctgctcgcgcgcctcgcggtcgagcagccgggtccgttcggcgggcgcgagatcgtcgtgccgagtgcggcgctgcgccgcagtgtcgagctcgcggtggcgcgacgcgaaggcgtcgcggcgaacctgcgcttttcgtacctcgcgcaatggctgtggagccagatcgacaaggtcgtcccggtcggcgaacagtccccgttcgcgccggcgctgctcgtgtggcggattttcgagcagttccaggatgctgcctggaccggcgcgcacccgcggctctcgcgttacctcgggacagccgacacgacgatgcgcttcgaactcgccgaacgcgtcgcgcgcgccttcgatcactacctcacgtaccgcccgcgctggctcgccgaatggtccgcggggaggacagtcgccggcctgccggacgacgcgcgcgccgatgaagcttggcaagccgggctgtggcgccggctgacggcggaactggggacgcgcagcgagcacccggcggaaacttttttccgtgtcatcgccgcagccggcgatgcgttgcccggcttcctgccggagtcggtgcacgtgttctgcctgccggcgatgccgccgctgtaccgcgacgtgctgcgtgaactgtcgcaacgggtcgacgtgcgcctgtacgtgctcaatccgtgccgcgaatactggttcgagatcgtcgagccgcgacgcctcgcctggctcgccggccagcagcaggatctctatttcgaatccggcaaccggctgctcgccgcgtgggggcggcagacgcaggcgcacatcgacctgctgttcgaaggcgaaggcgcgccggagatcgaggacagcctgttcgtcccgaccggcggcgcgagcctgctggcgcaactgcacgacgcggtgctcgacctcgtcgaccctgcgccgggcagcatcgcgctcgccgacgacgaccgcagcgtcgaagtgcacgtgtgccattcaattacgcgcgaactcgaagtgctgcacgaccggctgctcgcgctgtttgccgcgccggacgcgccgcggcccgacgacatcctcgtcgtcacgcccgatctcgacgctgcggcaccgctgatcgaagcggtattcggcaccgcgccgacgttgcgccgcattccctggacgatcaccggcctcggccagacgcgcgtcaacccggtcgcgcgcgtgctcgacgcggcgctcgcgctcgcggcgagccgtttcccggcgagccgcgtgttcgacctgctgcagcagccgccggtcgcgcgccgtttcggcctcgacggcgcggatctcgagcaggtgcatgaatggctgcgtgcagccggcgtgcgctgggggctcgacggcgcacatcgccgccggctcgacctgccaagcgtcgaccgtcacagcctcgtcgaaggcctgcaccggctgtttctcgcgtatgcgctcggcgatggaagcgcatgccccggcgaggacggcgatggcagtggccccgtgctgttcggcgggcgccttggcgccggcaatcccgaaggcggcgacgcgctcgcattggggcgcttgtggcgctacgccgagacgctgcagtggctcgaagcggccacgcgccgccctctcgacgccgacggctggcgcaagctgctcgtcgaactgctcgaccgcctggtcccgcccgatgtcgagtgggccgacgaccggcgcgcggtgctcgcggcgagcgccgaactgcacgcgaacatgacggcgggggggctgcgcagcccggtgccgctcgcgctcgtgcatgacgcgctcgccgcgctgctcgacgatccggcgcgcggcggcgtgccctgcggcgcggtgacgttctcggcgatgacgagcctgcgcagcctgccgtaccgcgtcgtgtgcgcgatcggcctcgacgacggcgcgttccccggcgccgagcgggccgtcgagttcgacttgatggcgaagcacggcgcgcgcggcgaccgccagcgccgcgacgacgagcgcaacctgttcctcgacctgctgcttgccgcgcgcgactgcgtgcatctgtcgtactcgggccgcagcgtgcgcgacaacagcgaaaagccgccttcggtgctggtggacgagctgctcgactacgccgcgcgcgcgtgcgccgccgatccgctcgacgcggcgtcgctcgctgcggcgcgtcgccggctgacggtcgtccatccgctgcaggcgttctcgcgcaactattttctcgccgactcgcagcgcgacccgcggctcgcgagcttcaacgccgaatactgcgatgcgctgcgcgcgcgcctgcaggcagcggcgcgcgggctgcccgctgcgcgcgccgtctctcgtgacgacgagcgcgacgaggacgacggctgcgaatcggggctgtccggcgaagcgccgtttttcgccgcaccgctgccgctgccggccgacgaatggcgaacggtcgggctcgaccggctgattcgtttcttccgcaatccggcccgcttcctgctgcgcgaacggctcggcgtgacggtgcccgaaggcgacgaggagctcatcgacgacgaagcgttcctgccggtgtggcgcgagcgccaggcgctcgccgaacggctgctgccggcgctgctcgccggacgcgcccccgcagccgtgcgcgagctcgcgcctgccggtggcgaattccccgccgggccgctcggcgagcgcctgctcgagcgcgaactcgacgtcctccgggcctatactgacggcctgcgcgcggcgctcgcgcccgacccgctgccgccgctgcaggcccacttcgacttcgacatccgcggcgaacgctggacgctcgacgccgcgttcggcgatgtgcgcccggccgggctcgtgcgccaccgctacgacgaggcgcgcgcgaacgactatgtcgccggctggatcgcgcatctcgcgctgtgcgcggccgcgcccgaggctgcggagctgtgcaccgaatggcattcgcgcgacggcgtctatcgcctgcggcactgcgacgacgcacgcggacagctcgccgcgctcgtcgcgctgtaccgcgaaggcctgatgcggccgctgccgttctttccgaaatcggcgtgggcgtgggtcgtcaacgactgcagccgctacaaggcggagcagaaatggcgcggtggcggccggcccgagtttggcgaatgccgcgacgcggcgatccggctcgcgttccgcgggctgccggacccgctcgacgacgcgttctacgaccacgccgcgacagtgctgcagccgctcgtcgcgcatctcgacgacccgaggctgtga

SEQ ID NO: 157225 - protein, 1122 aa, Azoarcus sp. EbN1
MLSLAFSNRYEVLLETLLARLAVEQPGPFGGREIVVPSAALRRSVELAVARREGVAANLRFSYLAQWLWSQIDKVVPVGEQSPFAPALLVWRIFEQFQDAAWTGAHPRLSRYLGTADTTMRFELAERVARAFDHYLTYRPRWLAEWSAGRTVAGLPDDARADEAWQAGLWRRLTAELGTRSEHPAETFFRVIAAAGDALPGFLPESVHVFCLPAMPPLYRDVLRELSQRVDVRLYVLNPCREYWFEIVEPRRLAWLAGQQQDLYFESGNRLLAAWGRQTQAHIDLLFEGEGAPEIEDSLFVPTGGASLLAQLHDAVLDLVDPAPGSIALADDDRSVEVHVCHSITRELEVLHDRLLALFAAPDAPRPDDILVVTPDLDAAAPLIEAVFGTAPTLRRIPWTITGLGQTRVNPVARVLDAALALAASRFPASRVFDLLQQPPVARRFGLDGADLEQVHEWLRAAGVRWGLDGAHRRRLDLPSVDRHSLVEGLHRLFLAYALGDGSACPGEDGDGSGPVLFGGRLGAGNPEGGDALALGRLWRYAETLQWLEAATRRPLDADGWRKLLVELLDRLVPPDVEWADDRRAVLAASAELHANMTAGGLRSPVPLALVHDALAALLDDPARGGVPCGAVTFSAMTSLRSLPYRVVCAIGLDDGAFPGAERAVEFDLMAKHGARGDRQRRDDERNLFLDLLLAARDCVHLSYSGRSVRDNSEKPPSVLVDELLDYAARACAADPLDAASLAAARRRLTVVHPLQAFSRNYFLADSQRDPRLASFNAEYCDALRARLQAAARGLPAARAVSRDDERDEDDGCESGLSGEAPFFAAPLPLPADEWRTVGLDRLIRFFRNPARFLLRERLGVTVPEGDEELIDDEAFLPVWRERQALAERLLPALLAGRAPAAVRELAPAGGEFPAGPLGERLLERELDVLRAYTDGLRAALAPDPLPPLQAHFDFDIRGERWTLDAAFGDVRPAGLVRHRYDEARANDYVAGWIAHLALCAAAPEAAELCTEWHSRDGVYRLRHCDDARGQLAALVALYREGLMRPLPFFPKSAWAWVVNDCSRYKAEQKWRGGGRPEFGECRDAAIRLAFRGLPDPLDDAFYDHAATVLQPLVAHLDDPRL

SEQ ID NO: 157226 - DNA, 3474 bp, Pseudomonas syringae pv. syringae B728a
  CDS (1)..(3474): transl_table=11
atgtccgttacaacctctctgagtgcaggcttcatggtggttcaaggcaaccgcccggatgaactgcgcagtctggttgtgtcctggatgcggcgttatccattggcgcccctggaaaacgagattgctctggtgcagagcaacggcattgcacagtggctgaagttggccttggccgaagatgctcaggatgaagataacggtggctgtggtatcgctgccgccatcgacgtccagttgcccggcagtttcatgtggacgctgtatcgcatggtgctgggtgcggatgagatcccccagacgtccttgctcgacaagacccctttgacctggcgcttgatgcgcttgttgccgtcgctgatcaatcagccgcacttcgagccgctgcagcgcttcctgaccgacgacactgatctgcgcaagcgctatcaattgtccgaacgcctgtccgatctgttcgaccaatatcaggtttaccgggctgactggctgcaagactgggccgctggccgccatcaattgcgcgacgtacgaggtcagtccagaccattgtcagctgccaattgctggcaagccgaactgtggcgcgcgttgctggacgacgtcggggctgaagggatgtcgcagagccgtgcaggcgtgcatcagcgcttcatcgagcgcatcggcaacatgaccgaagcgccaccgggcttgccggcacgggtcattgttttcggcatttcgtcactgccggcacaagcgctcgaggcgttggcagggctggccagattcagtcaggttctgctctgtgtgcacaatccgtgtcgtcaccactggaccgatatcgtcgccgacaaggacctgttgcgtcaccagtacaagcgtcaggcgcgcaagagcggcatgccgatggtcctcgacccgcaagcgctgcatcagcatgctcatccgttgctcgcggcctggggcaagcagggacgtgattacatcaacttgctggacagccacgacgacccacgcagctaccgttcctcgttcaaggacgagcgcattgacctgttcagtgagtcagagcccaccaacctcctgaaccagctgcaggacgatatccttgagctgcgtccgctggatgaaacccgtgagctgtggccggcagtcaatccttctgaggaccgctcgatccgcttccatgtggctcacagcgcgcagcgcgaagtagaggtgctgcatgaccagctactggcgagattcagcaaagaccctggcctgcgcccgcgtgacgtgattgtcatggtcccggatatcgacagctatgccccgcacatacgagcagtattcgggcagatcgagcgcgaagatcgtcgcttcatcccctttacgctggctgaccagggccagcgcggccgcgagccgttgctgattgctgtcgagcacctgctcaaactcccggacagccgtttcccggtcagcgagattctcgacctgctggacgttccagccttgcgcgcacgcttcaggattcaggagcgtgacctgccaacgctgcatcgctggatagaaggcgcaggtattcgttggggcctcaatgctcaacagcgtgccggtctggggctgccggatgcccttgagcagaacagctggcatttcggcctgcgtcgcatgttgctgggttacgccgtgggtgccggcgcggcttacgacggcatcgaaccctacgatgagatcggcgggcttgatgcggcgttgatcggtccgctggtcgcgttgattgatgctctccaggtcgcccacacagagttgtcgacacccaccactccggaagcatggggtgctcgcctgcaatcgctgctgcagttgttcttcctcgccgacagcgagcatgacgactacttgcttgcccagcttgaaacactgcgcgagaactggctggaaacctgtgcaacggtaagactgaccgatgagctgccgctgaccgttgtgcgtgaggcctggctggccgggctcgatcaagggcgcctgtcccagcgttttctggcgggctcggtcaacttctgcacgctgatgcccatgcgcgccatcccgttcaaagtggtctgcctgttaggcatgaacgacggcgattacccgcgtgcgcaaccgccgctggatttcgatctgatgggcagcgattaccgacccggcgaccgctcccggcgtgaagacgatcgctacctgttgctggaagccttgctctcggccagagaccagttgtacgtcagttgggttggccatagcattcgtgacaacagtgagcgtccagcttcggtgctcatcggtcagctgcgcgatcacctcgccagtggctggaagctggccggcgagaccgatccggacggtaaacacgatgatcagcgcttgctgaaagccctgactgtgaatcacccgttgcaacccttcagcgccaattacttccacgccggcacaggttatttcagcttcgcccgcgagtggcgcctgctgcatgaaaccgaccttcaggtgcccgtgcctcaagcgctgccggctcatgaacaggaagaaccgctgtccattgcgcagttacaggatttcctgagaaacccggtaaagcactttttcagtcagcgcctgaagatctatttcgaggtggctgaagcgccgctcgccgatgaggaaccgttcgtgctcgatgcccttgagcgttacggcctcagtgaaagcctgctcagcgcagcgatggtttcccctgacgatatggatgccgccctgaaaacccaggcgctgaaactgcaagccagtggactgctgccgctcgcgggcttcggcaccttgatgcagagcgagctgatcgagccgctgcctgacgtactcaggcgctaccacgatctgttgaccctctggcccgagaccctgagcagcgctttaccgatcggcttcagccatgcgggtgtgagcatcgacggctggctgggcgggctgcaccgtaacgcccgtggcgagctgttgctggtcactgcaattcccaacagcatcggctcgaaaaagacccgcaagtggcaccggctgattcggccgtgggtcaatcacctggtggcgtgcgcctgcgacctgccgttgagcacggcactggtcgccagtgatgaaaccctgatgctggagccgctggacaaggcgagtgccgtcaccacgctcaatcacttgctgacggcctggctgcacggcatgcaagaaccccttccggtggcggtcaaaaccgccttcgcctggttgggccagcctgccgacaaagccgaagcggctgcccgcaaagcctacgaaggtgacggacagactaccgatggcgagcgccgcgaaagcacggcactggctcggcagtttcccgactttgacgcactgatcgacagtgaagaattcgcaggctggtgcgagacgctctacaaaccgatttacgacgcgccctggcagtcgttgtccggcggggagggcggcgcatga

SEQ ID NO: 157227 - protein, 1157 aa, Pseudomonas syringae pv. syringae B728a
MSVTTSLSAGFMVVQGNRPDELRSLVVSWMRRYPLAPLENEIALVQSNGIAQWLKLALAEDAQDEDNGGCGIAAAIDVQLPGSFMWTLYRMVLGADEIPQTSLLDKTPLTWRLMRLLPSLINQPHFEPLQRFLTDDTDLRKRYQLSERLSDLFDQYQVYRADWLQDWAAGRHQLRDVRGQSRPLSAANCWQAELWRALLDDVGAEGMSQSRAGVHQRFIERIGNMTEAPPGLPARVIVFGISSLPAQALEALAGLARFSQVLLCVHNPCRHHWTDIVADKDLLRHQYKRQARKSGMPMVLDPQALHQHAHPLLAAWGKQGRDYINLLDSHDDPRSYRSSFKDERIDLFSESEPTNLLNQLQDDILELRPLDETRELWPAVNPSEDRSIRFHVAHSAQREVEVLHDQLLARFSKDPGLRPRDVIVMVPDIDSYAPHIRAVFGQIEREDRRFIPFTLADQGQRGREPLLIAVEHLLKLPDSRFPVSEILDLLDVPALRARFRIQERDLPTLHRWIEGAGIRWGLNAQQRAGLGLPDALEQNSWHFGLRRMLLGYAVGAGAAYDGIEPYDEIGGLDAALIGPLVALIDALQVAHTELSTPTTPEAWGARLQSLLQLFFLADSEHDDYLLAQLETLRENWLETCATVRLTDELPLTVVREAWLAGLDQGRLSQRFLAGSVNFCTLMPMRAIPFKVVCLLGMNDGDYPRAQPPLDFDLMGSDYRPGDRSRREDDRYLLLEALLSARDQLYVSWVGHSIRDNSERPASVLIGQLRDHLASGWKLAGETDPDGKHDDQRLLKALTVNHPLQPFSANYFHAGTGYFSFAREWRLLHETDLQVPVPQALPAHEQEEPLSIAQLQDFLRNPVKHFFSQRLKIYFEVAEAPLADEEPFVLDALERYGLSESLLSAAMVSPDDMDAALKTQALKLQASGLLPLAGFGTLMQSELIEPLPDVLRRYHDLLTLWPETLSSALPIGFSHAGVSIDGWLGGLHRNARGELLLVTAIPNSIGSKKTRKWHRLIRPWVNHLVACACDLPLSTALVASDETLMLEPLDKASAVTTLNHLLTAWLHGMQEPLPVAVKTAFAWLGQPADKAEAAARKAYEGDGQTTDGERRESTALARQFPDFDALIDSEEFAGWCETLYKPIYDAPWQSLSGGEGGA

SEQ ID NO: 157228 - DNA, 3366 bp, Haemophilus influenzae 86-028NP
  CDS (1)..(3366): transl_table=11
atgttcattatttattattccaatcagcttgaaaaacaaaaagaaattctttcttctttattcaaatctttaccacctgaagatccttttcaacaagatattattttggtgcaaagccctaatatggcacaatggctacaaattgaactcgccaaagaaacaggcatttcagcgaacctaaaatttcctatgccagcaagttttatttggcagctttatgctcaaaatttacccgcaacggcattggaaaacccttttgataaagattcaatgatgtggcgtttaatacgcttaatcccgacttttctcgagaaagaaaattttttgcctttacgaaattatttagcatcttcgccacattctgaacaatacaaactttatcaacttagcagtaaaatagccgacttatttgaccaatatttagtttaccgagctgaatggatttttgcttgggaaaaaggcgaagatgaacaaatcactgcgcaaatacgaaagcaacaacctaacctaaacgatacgttgtttgagcaaattcaaggcaatataaaatggcaaggggagctatggcgtgcgttggtcgtcgatgttaaatcagatgttgatgatgctacacatcgagcggctttgcataatcagttcttagccttgcttgcggataaaaaagcaccgaaaaaattaccttcacgcatatttatttttggtattccagcgcttccaactgcttatctcaatattttgcaagcgatatcctctgaagtggatattcatttattttttaataatccttgccaagaatattggggggatattagtgatctacgccttgattatttgcgttctcgtcagcgttatcaattcaataaacaaaatgaaaatcaaccgctcttttctgaggaacaactttctcaactagaaaacgctcagtttgacgtcacttatcaaaatgaaaaccttcaagtaggcaatccattgctggcggcttgggggaaaatgggacgagattttctctataccttagtgcgagatgaagaacatattccaacttatcccgtcaatgcttatcaagaaattaaatcgaacagtttacttggacaattgcaatctcaaattctgcatttagaaaataaaccgttaaatatcgcaaaaaatgaccgcactttaactctacattcttgccacagtgctatgcgggaagtggaagtcttgcacgattatttactcgatttattcaatcaagatcctaaccttacgccaaaagatgtagttgttatggtggcagatataaatcaatacacgccttatattcaggccgttttcgggcaaaaaaatagaaatgctccacaaattccattttcactttcagataataaactttcagaaagcgatgtgttggtctcaagttacttaactttattacgcttaaaagaaagcaattttagtgcggaagatgtgttagcgttgttggatattcctgcgacgcgagaacgatttaatatttctcttgctgatttaccattagtgcgagaatgggtggcggattcagggattcgtttcggtttgcaaaaaaatcaagatggcatcaattttaattcttggcaagctggattagaaagaatgattttaggctatgcgatgcgtgaagagcagggtatttggcaagatagtttggggttaaacagcagctatggcttaaaaggtgaacttgctggaaatttatcgtactttttcaccgcactttccttgctgcatgaaaccctgcaacaagcacattccatcgaaaaatggcaagaaattttaaccgcacttttatcagatttcttcgtacaaaatgaagacactagcgacacgattttctatattcaagagaaaattaatgaattagctgagcatctaaaaatgctccattttactgaaaaattacaagcagatgtgattgccgatgtcatcacaatgaaattggaagatgcgccaaatagcctcaaattccttgcagggaaagtaaacttctgcaccttattaccaatgcgttcagtgccattcaaagtggtttgtttacttggaatgaatgatgccgattacccaagaacacaaacaccaaacagttttgacttaatgcaatatcattatcaaaaaggcgaccgtgttcgccgtgatgatgatcgttatttgttcttagaggccttattagccgcacgtaattattgctatatcagctatattgggcgttccattaccgataatcaaccgaaagaaccctccgtattggtaagccaactcgtggattatattaatcaagggcaaaaggaaaatgtccttactgtcattgaacatccaatgaccgcatttagcccagataatttcaaatataacgagaaatttacccgctcttttgcgacaaaatggttgccaatggctcaatttgacgcaagtgcaagtaattcggaatttgccgtcactatgacagaaaacccagaaaaaatcgaagaagttgaactggattctttagtcagctttgtggaaaatccagtgaaatttttctttgaaaaacaacttggtgtttatttccgcgataaagatgaacgcattgctgacagtgaaaacttcactttaagtgggttagataattattctctcaataatgacttaatttaccttgatgaacaaaattttgctgattattttagacaagcagaagtaaaaggcgtgttaccgcgcgcagagtttggaaaggtttatgctgaaaatattcgcgataatgttttagaatttaaagagaaaatagccgatcttggcgagcctaaacaggcttctatagattttaatattgccgtagattggcaaaacgaaaatcaaaaaatccgtttatttggttatatggaggctttatttggcgataattcacaagtcattcactggcattttgcgaaatacaaagatcgttattgtattcgtccttggatttattatttaattcaatgtgttacacaagaaaatgcggtaccagcaaaattaattacgcaagataaggttctcgaattaccgcctattgagcgtgaagttgcgcttgctcaattacaaatttacgtaaaagattatttacaaagccaaatagaaatacaattggtgccaacagtaagaaatataagtgattttattgtaagtgatgaaaattccgtttctgaaaaacttcaggaattaactgaaagtaatggtttcgggtcaaaagccgatccatattggtcacgagtattagcgcagacctcaagatttaaacaacctgaaaatattgcgaaattattaaaacaaacaaaagcttggtttggcttattattcgcacaaaagaagacaagaaaggcacaaagctaa

SEQ ID NO: 157229 - protein, 1121 aa, Haemophilus influenzae 86-028NP
MFIIYYSNQLEKQKEILSSLFKSLPPEDPFQQDIILVQSPNMAQWLQIELAKETGISANLKFPMPASFIWQLYAQNLPATALENPFDKDSMMWRLIRLIPTFLEKENFLPLRNYLASSPHSEQYKLYQLSSKIADLFDQYLVYRAEWIFAWEKGEDEQITAQIRKQQPNLNDTLFEQIQGNIKWQGELWRALVVDVKSDVDDATHRAALHNQFLALLADKKAPKKLPSRIFIFGIPALPTAYLNILQAISSEVDIHLFFNNPCQEYWGDISDLRLDYLRSRQRYQFNKQNENQPLFSEEQLSQLENAQFDVTYQNENLQVGNPLLAAWGKMGRDFLYTLVRDEEHIPTYPVNAYQEIKSNSLLGQLQSQILHLENKPLNIAKNDRTLTLHSCHSAMREVEVLHDYLLDLFNQDPNLTPKDVVVMVADINQYTPYIQAVFGQKNRNAPQIPFSLSDNKLSESDVLVSSYLTLLRLKESNFSAEDVLALLDIPATRERFNISLADLPLVREWVADSGIRFGLQKNQDGINFNSWQAGLERMILGYAMREEQGIWQDSLGLNSSYGLKGELAGNLSYFFTALSLLHETLQQAHSIEKWQEILTALLSDFFVQNEDTSDTIFYIQEKINELAEHLKMLHFTEKLQADVIADVITMKLEDAPNSLKFLAGKVNFCTLLPMRSVPFKVVCLLGMNDADYPRTQTPNSFDLMQYHYQKGDRVRRDDDRYLFLEALLAARNYCYISYIGRSITDNQPKEPSVLVSQLVDYINQGQKENVLTVIEHPMTAFSPDNFKYNEKFTRSFATKWLPMAQFDASASNSEFAVTMTENPEKIEEVELDSLVSFVENPVKFFFEKQLGVYFRDKDERIADSENFTLSGLDNYSLNNDLIYLDEQNFADYFRQAEVKGVLPRAEFGKVYAENIRDNVLEFKEKIADLGEPKQASIDFNIAVDWQNENQKIRLFGYMEALFGDNSQVIHWHFAKYKDRYCIRPWIYYLIQCVTQENAVPAKLITQDKVLELPPIEREVALAQLQIYVKDYLQSQIEIQLVPTVRNISDFIVSDENSVSEKLQELTESNGFGSKADPYWSRVLAQTSRFKQPENIAKLLKQTKAWFGLLFAQKKTRKAQS

SEQ ID NO: 157230 - DNA, 3420 bp, Pseudomonas fluorescens Pf-5
  CDS (1)..(3420): transl_table=11
atggtggttcacggtaaccgcctggacgagttgcgcagcctggtggtcagttggatgcggcgttatcccctggcgcccctggaaaatgaaattgccctggtacagagcaacggtatcgcccaatggctgaaactggccctggccgaagaccccgaagtggatgacggcggtggctgcggtattgccgctgccattgatgtgcaattgccgggcagtttcatgtggcagttgtaccgcctggtcctggggcgagacgaaatcccgcccaaatccctgctggataaagctcccctgacctggcggctgatgcgcctgttgccggagttgatcgatgagccgcatttcgaacccctgcaacgcttcctgacccacgacagtgacctgcgcaagcgctatcaattggccgagcgtctggccgatctgttcgaccaataccaggtatatcgagccgactggctggaggattgggccgccggccgccaccaactgcgcaatggtcgtggtgaaaccaaggccctgacgcctgccaactgctggcaggccgagctatggcgcgcgctgctgttggatgtcggcaccgaggggatggcccagagtcgcgcaggcgttcaccagcgctttatcgaacggatcaaccaactggaggtggcgcccagtggcttgccgtcccgagtgatcgttttcggtatctcttcgctgccggcccaggccctggaggcactggccgggttggcccgcttcagtcaggtgctgctgtgtgtgcacaacccttgtcgccatcactgggccgatatcgttgccgacaaggacctgctgcgccaccaatacaaacgccaggcgcgcaaggccggcatgcctcaggccctggatccgcaaaccctgcaccagcacgcccacccgctgctggccgcctggggcaagcaaggccgtgactacatcaacctgctggacagctatgacgatcccaacagctatcgcagcgcttttcgcgatggccggatcgatctgttcagtgacagccagccggccagtatgctccagcaattgcaggacgacattctcgaactgcgcccgctgaacgaaacacgtgagttgtggccgcaggtcgatatccagcacgatcaatcgattcgctttcacattgcccacagcgcccagcgagaagtggaaatccttcacgaccagctcctggcgcgcttcagtgcagagcccgacctgcggccccgggatgtgatcgtcatggtcccggacatcgacagctacgccccgcatatccgcgcggtgttcggccagctggagcgggatgaccggcgcttcattccctttaccctcactgaccagggccagcgtggccgtgacccgctgctgatcgccgtcgaacatctattgaagctgccggacagtcgttttccggtcagtgagattctcgacctgctggacgttccagccctgcgtgcgcgttttggcgtcgacgaagccgacctgccgaccctgcaccgctggattgaaggtgccggcatccgttggggaatgaatgccgagcagcgcgcagaactggggctgcccccggaactggagcagaacagctggcgtttcggcttgcggcgcatgctcctgggttatgccgtcggccgctccgacgcctgtgacggtatcgagccttatgacgagatcggtggcctggatgcggcgctgatcggtcccctggtcgcccttcttgacgccctgcagatcgcctaccagcaactcacccagccggcggatccggcggagtggggcgagcgcctgcacaacctgctggaacagttcttccttgccagcaacgagcacgatgattacctgctgggacagctcgacgacctgcgggaaaactggctggaaacctgcgagtctgtgggcctgcaagatcagttgccgctgacggtggtccgcgaagcctggctggctggcctggaccaggggcgcctgtcccagcgtttcctcgccggagcggtgaacttctgcaccctgatgccgatgcgcgccattcccttcaagctggtgtgcctgctgggcatgaacgatggcgattaccccagggcgcagccgcctctggacttcgacctgatgggtagcgactaccgccccggcgaccgatcacggcgcgaagacgaccgttacctactgcttgaagccctgctctcggctcgtgaccaactttatgtcagttgggttggccgcagcattcgcgacaacagcgagcgcccggcctcggtcctgatcggccagttgcgcgatcacctggccagcggctggcgactgcccgatgagcaggactccctgctggaggccctgacccaggagcatcccctgcaacccttcagtgcccgctatttccacgacagcgacacgctgttcagctacgcccgggagtggcaagtgctgcatcaggtccgagaggaactgggcgcagtcgaacgcctggaaccctatgtccaggacgagcccctgagccttgcccagttgcaggatttcctgcgcaacccggtgcggcatttcttcagccaaaggctcaaggtgttctttgaagccatggaagcaccgctggccgatgaagagcccttcgtgctcgatgccctgcagcgctacagcctcagcgacagcctgctggaagcggcgctgggcgacgcagcgcagcccgagcaagccttgcaggcccaggcccagaggctgcaagccagtggcctgttgcccatggccggttttggcgaatgcctgcagcgcgaactgctggagcccctgccggacctgttgcagcgttatcggcaactgctcgacctgtggccgaccccggtaaccagcgcgctgccggtgagcctggaactgcaaggcgtgcgcctggaaggttggctcagcagcctgcaccagcgagctgatggcgggttgttggctgtgagcgccatccccaacggcatcggctcgaccaagacccgtaaatggcatcggctgatcaagccttgggtcaatcatctgctggcctgcgccagtggttactccttgaccaccgcgctggtggccagcgatgacagcctgttgttgccgccgctggagcaggaggtggcccggcagattctcggcagcctgctgcaggcctggcaggccggcatgcgcctgccgctgccggtggcgatcaagaccgccttcgcctggctgggccagagcgacccggacaaagccgcggccgctgcacgcaagacctacgatggcgacggccagaacagcgagggcgaacgccggcaaagcccggccctggcccgccaattcgccgactacaacgcactgatcgccgatgaaaccttcagcggttgggccgagaccctttatcgacccctgttgaatgctccctggcgttcggcgctcggcgaggaggcaggcgcatga

SEQ ID NO: 157231 - protein, 1139 aa, Pseudomonas fluorescens Pf-5
MVVHGNRLDELRSLVVSWMRRYPLAPLENEIALVQSNGIAQWLKLALAEDPEVDDGGGCGIAAAIDVQLPGSFMWQLYRLVLGRDEIPPKSLLDKAPLTWRLMRLLPELIDEPHFEPLQRFLTHDSDLRKRYQLAERLADLFDQYQVYRADWLEDWAAGRHQLRNGRGETKALTPANCWQAELWRALLLDVGTEGMAQSRAGVHQRFIERINQLEVAPSGLPSRVIVFGISSLPAQALEALAGLARFSQVLLCVHNPCRHHWADIVADKDLLRHQYKRQARKAGMPQALDPQTLHQHAHPLLAAWGKQGRDYINLLDSYDDPNSYRSAFRDGRIDLFSDSQPASMLQQLQDDILELRPLNETRELWPQVDIQHDQSIRFHIAHSAQREVEILHDQLLARFSAEPDLRPRDVIVMVPDIDSYAPHIRAVFGQLERDDRRFIPFTLTDQGQRGRDPLLIAVEHLLKLPDSRFPVSEILDLLDVPALRARFGVDEADLPTLHRWIEGAGIRWGMNAEQRAELGLPPELEQNSWRFGLRRMLLGYAVGRSDACDGIEPYDEIGGLDAALIGPLVALLDALQIAYQQLTQPADPAEWGERLHNLLEQFFLASNEHDDYLLGQLDDLRENWLETCESVGLQDQLPLTVVREAWLAGLDQGRLSQRFLAGAVNFCTLMPMRAIPFKLVCLLGMNDGDYPRAQPPLDFDLMGSDYRPGDRSRREDDRYLLLEALLSARDQLYVSWVGRSIRDNSERPASVLIGQLRDHLASGWRLPDEQDSLLEALTQEHPLQPFSARYFHDSDTLFSYAREWQVLHQVREELGAVERLEPYVQDEPLSLAQLQDFLRNPVRHFFSQRLKVFFEAMEAPLADEEPFVLDALQRYSLSDSLLEAALGDAAQPEQALQAQAQRLQASGLLPMAGFGECLQRELLEPLPDLLQRYRQLLDLWPTPVTSALPVSLELQGVRLEGWLSSLHQRADGGLLAVSAIPNGIGSTKTRKWHRLIKPWVNHLLACASGYSLTTALVASDDSLLLPPLEQEVARQILGSLLQAWQAGMRLPLPVAIKTAFAWLGQSDPDKAAAAARKTYDGDGQNSEGERRQSPALARQFADYNALIADETFSGWAETLYRPLLNAPWRSALGEEAGA

SEQ ID NO: 157232 - DNA, 3597 bp, Colwellia psychrerythraea 34H
  CDS (1)..(3597): transl_table=11
ttgatccatctttatcctgccaacaaaatggaaaacttgttgctcttgctcaacaaaatttcccagctttcccctctaggtgtatttaatcaagaagtcattgtggtacaaaatgcaggtatgcagcattggcttaatttagccattgcacaagaacgcggtattagcatgaatatgcgttacgcgttaccagctcagtttctatggaagctaataaggtcgctggctagtgatgagaaggtgcctgaacagtcaccttattcaagggaggtgctttgttggcgtatacatgcactgttagcgctagattctgtagtagaagatgatgattttagtcaagctacgcactattggcgtggcgaaaatacgacagacgaagaggataataatacagttaatgatagcaaacatgcacagctaaaacggtatcagttagccacacaattggccgatttatatgagcagtatttgattttcagaccgcagtggttagacaattggcaacaaggaaattttgaactagacggcttagaaaaaatatcagccagtgagcataaatggcaaggcaagctgtggcgattattaattgcccaattaccttataatcctgttgaattaatgcatgatgctattgctaacattcaggacaaaaaagagcttattccaccgcgtattagtttttttggtcttaataccatggcaccaatgtggttgaattttattaatgccctaagtgagcatgttgaagtacatttctttcatcttaacccgtgtttctcgtattggggcgatgtcgttactgaaaaatacgccttaaataagttatcacaatggtctgatggcgttttacccgaggaattggatgtacatagctatgtcggtaatccgttattagccaacttgggccagcaggggcgcgagtttatctcaatgttacaagattacagtaccatcgatgttgagttatttgagcaagctaaaagtgcccaagcaataagtaataataacgacgtaacgagtgttttacatcagctgcaaaacgatattcttgaactgtctgatgcaagatctcccgatgatgaagccatcactcccaaagcagtacaacatgatgattcaattgtgatcaccagttgtcatagcgcattacgggaagtccaagcactacatgactatttattgcatcaatttaatcaagacaaaagcttaacacctaaagatatcttggttatgtgtccacaaatagaacaatatgccccctatgtaaatgccgtatttacccgtggttggcaagacatagcaggtgaagtgccgccactaccttgttctattgctgatcgcagtgctaaagatagtgacccgctagtagccgcttttactgaattactgacattgccggatagccgctttggtgtctcacaattgttatcttttttacgtttacctgccatggctaataacttttcgattaacggcgaagacttagctaaaatttctgcttggcttgaacaagccacggtacactggggattagacttaacccacaaacaatcattgttagggcaacaagcaaacgcttcatttacttggcaacaaggcttgtcacgtttacttcgtggttttgcttatgccgacagcgaacaaatttatcaacaacaactgttattgagtaatgttgaaggtagtgacagcatcttactcggtcagttaatgttatttatcgaacaattacattactttagtgaaaatctgcaaagatctcgcaccgcgatacaatggcaaacttttttacttgaacaattaagccatttatttagccgagtcgatgccgacaacgtcagtaatgaaaatagcctgatggtgattgagcaagcaattgcaggcctggtcgaacattgtcaccacgctcattttgaagatgatatatcactattaattgtggttgattatttaagccaacattttagccaaggtgatgccagtaagcagtttatggtcgggcaggtaaccttttgctctatgttacctatgcgtagtattccgtttaaggtaatcgcggttttggggttgaatgatggagaattccctagacaacgacaagccttaggttttgatcttatgtcgttgtcaaaagctaaattaggcgatagatcacgacgtggggatgaccgatacttatttcttgaagctataatctcgtcaagaaactcgttatacctgagttatcaaggccgaaacatcaaaaacaataatgaaaaacaaccgtcattagttgtaaaagaactaatggaatatctagcacaaggttacggttggcagttttcagaagagcagctcacttctgataataacaatgatgataccaatgccgaaagcaatcaatcaggtatctatcaattagccatgcaagcctttagtcctaataactatcgaggaacttggccaagttttgatgctaattggttagcgctaggacaaagttccaatagcgataatgacgagagcatgggagaaggttctacgcttgctattgaaagtctggctgtaacaccagagcaaacggttgaggtcagtttatcttgccagcagttgatacgtttttatcagcatcctgcaaaaatgtttgcccagcagcaacttaatttatattttgagaatcacgatgtcttacttgaagatgtcgaaccctttagcgttaatcacttacaaagctatttattacgacaagatttactcagtgccgcattaactggaacaatagagtctccatcaaataaagatgggtctgaacaggtgataacccgcgcgcacttatcaggtaagttccctgatttaccgactacaactaatctatttaaagattatcagctggatgttcaacaatttagcgaagaaattagcaaagttaactgtgagaatcctgagcttatcgattgcaatctagtgctagatattgacggtactgaagttgatggacctagcgcccaaaaaattagggtttcactaaatacgaaattagcagtgaagaataatttgttagtgcactatcgtagctcaagtgccaaagccaaagataagtttgttatgtatttccagcaacttgtcgtacaggtatggcaagatcaagctattgccaatgaaactaatattactgatgacaatcaaaggttacagcaagtgactgaaactattggtttatattttaacaccaaagcccagaaagtagagcagttcaatgtggcaaacattgctgatgcaaaatcaaaattgattaatcttgttaagatgtttttcaaaggtcaacaacaggtattgttattaaatggtgaattggcagatcaggtatttactaaaaaacgagggcaactcgtcgagatgacacaagcacgttttgaaggtttatggataggtgatatgagcacgcgtggtttgagtgatgatgattaccttagctatttttggccagaatgtccgcagtatcataatcaccaagctgacattgagtttatctatcaagacttatatcaagtagtcgccaaacaagccgctaagaaagcgagtaaaacgactgctaagccaagcaaggaggctaaataa

SEQ ID NO: 157233 - protein, 1198 aa, Colwellia psychrerythraea 34H
MIHLYPANKMENLLLLLNKISQLSPLGVFNQEVIVVQNAGMQHWLNLAIAQERGISMNMRYALPAQFLWKLIRSLASDEKVPEQSPYSREVLCWRIHALLALDSVVEDDDFSQATHYWRGENTTDEEDNNTVNDSKHAQLKRYQLATQLADLYEQYLIFRPQWLDNWQQGNFELDGLEKISASEHKWQGKLWRLLIAQLPYNPVELMHDAIANIQDKKELIPPRISFFGLNTMAPMWLNFINALSEHVEVHFFHLNPCFSYWGDVVTEKYALNKLSQWSDGVLPEELDVHSYVGNPLLANLGQQGREFISMLQDYSTIDVELFEQAKSAQAISNNNDVTSVLHQLQNDILELSDARSPDDEAITPKAVQHDDSIVITSCHSALREVQALHDYLLHQFNQDKSLTPKDILVMCPQIEQYAPYVNAVFTRGWQDIAGEVPPLPCSIADRSAKDSDPLVAAFTELLTLPDSRFGVSQLLSFLRLPAMANNFSINGEDLAKISAWLEQATVHWGLDLTHKQSLLGQQANASFTWQQGLSRLLRGFAYADSEQIYQQQLLLSNVEGSDSILLGQLMLFIEQLHYFSENLQRSRTAIQWQTFLLEQLSHLFSRVDADNVSNENSLMVIEQAIAGLVEHCHHAHFEDDISLLIVVDYLSQHFSQGDASKQFMVGQVTFCSMLPMRSIPFKVIAVLGLNDGEFPRQRQALGFDLMSLSKAKLGDRSRRGDDRYLFLEAIISSRNSLYLSYQGRNIKNNNEKQPSLVVKELMEYLAQGYGWQFSEEQLTSDNNNDDTNAESNQSGIYQLAMQAFSPNNYRGTWPSFDANWLALGQSSNSDNDESMGEGSTLAIESLAVTPEQTVEVSLSCQQLIRFYQHPAKMFAQQQLNLYFENHDVLLEDVEPFSVNHLQSYLLRQDLLSAALTGTIESPSNKDGSEQVITRAHLSGKFPDLPTTTNLFKDYQLDVQQFSEEISKVNCENPELIDCNLVLDIDGTEVDGPSAQKIRVSLNTKLAVKNNLLVHYRSSSAKAKDKFVMYFQQLVVQVWQDQAIANETNITDDNQRLQQVTETIGLYFNTKAQKVEQFNVANIADAKSKLINLVKMFFKGQQQVLLLNGELADQVFTKKRGQLVEMTQARFEGLWIGDMSTRGLSDDDYLSYFWPECPQYHNHQADIEFIYQDLYQVVAKQAAKKASKTTAKPSKEAK

SEQ ID NO: 157234 - DNA, 3477 bp, Pseudomonas syringae pv. phaseolicola 1448A
  CDS (1)..(3477): transl_table=11
atgtccgttacaacctctctgagtgcaggtttcatggtggttcaaggcaaccgcccggatgagctgcgcagcctggttgtgtcgtggatgcgacgttatccattggcccccctggaaaacgagattgcgctggtccagagcaacggcattgcgcagtggttgaaactggcgttggccgaggacgctcaggatgaagatagcggtggctgtggcattgccgcagccatagacgtccaattgcccggtagcttcatgtggacgctgtaccgcatggttctcggaagcgatgaaataccgtcgacttccttgctcgacaagaccccgctgacctggcgcttgatgcgcttgctccctgaactcatcaatcagccacacttcgagcccctgcagcgtttcctgaccgacgacactgatctacgcaagcgctatcaattgtccgagcgcctgtcagatctgttcgaccaatatcaggtttaccgcgccgactggctggaggactgggccgctggccgccatcaattgcgcgacggccgaggtcaggccagaccgctgtcagccgccaattgctggcaagccgaactgtggcgcgcgctgctggatgatgtcggtgccgaaggtatgtcgcagagtcgagcgggtgtgcatcagcgcttcatcgagcgcatcggcaacatgaccgaagcgcccccgggtttgccggcacgcgtcatcgtttttggcatttcctcgttgcccgcacaagcgctcgaggcattggcgggtctggcgaagttcagccaggttctgctctgcgttcacaacccgtgccgccatcactggactgatatcgttgccgacaaagacctgctgcgtcaccagtacaaacgccaagtgcgcaagaccggaatgccgatggtcctcgacccgcaagcgctgcatcagcatgctcatccgctgctcgctgcctggggcaagcaggggcgcgattacatcaatttgctggacagccatgatgatccgcgcagctaccgctcttcgttcaaggacgagcggattgatctgttcagtgaagtcgagcccaccaatctgctgaaccagttgcaggacgatattctcgagctgcgcccgctggatgaaacccgtgagctctggccggcagtcgatccgctggaagatcgctcggtccgtttccatgttgcgcacagtgcgcagcgcgaagtggaagtgctgcatgaccagctattggcacggttcagcaaagacccgggcctgcgcccgcgtgacgtgattgtcatggtcccggatatcgacagctacgccccacacatacgagcagtattcgggcaaatcgaacgcgaagatcgtcgcttcattccctttacgctggccgaccaggggcaacgtggccgcgaacccttgctgattgccgttgaacacctcctcaaactcccggacagccgcttcccggtcagcgaaatccttgacctgctcgacgttcccgccttgcgcgcgcgcttcaggattcaggagcgcgatctgccaacgctgcaccgctggatagaaggcgccggcattcgctggggcctcaacgcacagcagcgtgccggtctggggttgccggatgcgctggagcagaacagctggcattttggtctgcggcgcatgctgctgggttacgccgtgggtgcaggtgacgcttacgacggcattgagccttacgatgagattggcgggcttgatgccgcattgatcggcccactggtagcgctgattgacgcgcttcaggtggcccatacggaattatcgacacccgcaactccgtacgcgtggggaacgcgcctgcaatcgctgttgcagttgttcttcctcgccgacagcgaacacgacgattacctgctcgctcagcttgaaacactgcgcgaaaactggctggaaacctgtgaagctgtaaggctgaccgatgagctgccgttgaccgttgtgcgtgaggcctggctggccgggcttgatcaggggcgtctatcccaacgctttctggcgggctcggtcaacttctgcaccctgatgcccatgcgcgccattccattcaaagtggtctgcctgctgggcatgaacgacggcgattacccgcgcgcgcaaccgccgctggatttcgacctgatgggcagcgactaccgtcccggcgaccgttcgcggcgtgaagacgatcgctacctgttgctggaggcgctgctctcggccagagaccagctctatatcagctgggttggccacagcattcgggacaacagcgagcgtcctgcatcggtgttgattggccaattgcgcgatcacctggcccgtggctggaaactgactggcgagaccgaaccggacggcaagcaggatgatggcgagcgtttgctgaacgcgctgactgtggatcacccgctgcagcctttcagtgccagttacttccatgcaggcacggggtatttcagcttcgcccgcgagtggcgcctgctgcatgaaaccgaccttcaggtgcccgtacctcaagcgcttcccccccatgagcaggaagaacccctgtccattgcacagttacaggacttcctgagaaacccggtgaagcatttcttcagccagcgcctgaagatctatttcgaagtcgccgaagcgccgctcgccgatgaggaaccgttcgtgctggacgcgcttgagcgttacggcctcagtgaaagcctgctcagcgcagcgatggcttcccctgacgatatggatgtcgccctgaaagcccaggcactgaaactgcaagccagtggcctgctgccgctcgcggggttcggcaccttgatgcagagcgagctgatcgagccgttgccagacgtcctcaagcgttaccacgacctgttgaccctctggcccgaaacgttgagcagcgcattaccgatcagtttcagccatggcagtgtgagtatcgatggctggcttggcgggctgcaccgtaacgctcgtggtgagctgttgctggtcacggcgattcccaacagcatcggctcgaaaaagactcgcaaatggcaccggctgattcggccgtgggtcaatcacctggttgcctgcgcctgcgagctgccgttgcacacggcactggtggccagtgacgaaaccctcatgctcgaaccgttggacaaggacgcggccattaccacgctgaatcatttgcttatggcttggctacgcggcatgcaagagcctttaccagtcgccgtcaaaaccgcatttgcctggctgggccagcccgccgacaaagccgaagcagcagcccgcaaggcctacgagggtgacgggcagaccactgatggtgagcgccgcgaaagcaccgcgctggcccgacagtttccggactttgacgcgctggtcgacagtgaagagtttgcaggctggtgcgagacgctctacaaaccggtttacgatgcgccctggcagtcgttgtctggcggggagggtggcgcatga

SEQ ID NO: 157235 - protein, 1158 aa, Pseudomonas syringae pv. phaseolicola 1448A
MSVTTSLSAGFMVVQGNRPDELRSLVVSWMRRYPLAPLENEIALVQSNGIAQWLKLALAEDAQDEDSGGCGIAAAIDVQLPGSFMWTLYRMVLGSDEIPSTSLLDKTPLTWRLMRLLPELINQPHFEPLQRFLTDDTDLRKRYQLSERLSDLFDQYQVYRADWLEDWAAGRHQLRDGRGQARPLSAANCWQAELWRALLDDVGAEGMSQSRAGVHQRFIERIGNMTEAPPGLPARVIVFGISSLPAQALEALAGLAKFSQVLLCVHNPCRHHWTDIVADKDLLRHQYKRQVRKTGMPMVLDPQALHQHAHPLLAAWGKQGRDYINLLDSHDDPRSYRSSFKDERIDLFSEVEPTNLLNQLQDDILELRPLDETRELWPAVDPLEDRSVRFHVAHSAQREVEVLHDQLLARFSKDPGLRPRDVIVMVPDIDSYAPHIRAVFGQIEREDRRFIPFTLADQGQRGREPLLIAVEHLLKLPDSRFPVSEILDLLDVPALRARFRIQERDLPTLHRWIEGAGIRWGLNAQQRAGLGLPDALEQNSWHFGLRRMLLGYAVGAGDAYDGIEPYDEIGGLDAALIGPLVALIDALQVAHTELSTPATPYAWGTRLQSLLQLFFLADSEHDDYLLAQLETLRENWLETCEAVRLTDELPLTVVREAWLAGLDQGRLSQRFLAGSVNFCTLMPMRAIPFKVVCLLGMNDGDYPRAQPPLDFDLMGSDYRPGDRSRREDDRYLLLEALLSARDQLYISWVGHSIRDNSERPASVLIGQLRDHLARGWKLTGETEPDGKQDDGERLLNALTVDHPLQPFSASYFHAGTGYFSFAREWRLLHETDLQVPVPQALPPHEQEEPLSIAQLQDFLRNPVKHFFSQRLKIYFEVAEAPLADEEPFVLDALERYGLSESLLSAAMASPDDMDVALKAQALKLQASGLLPLAGFGTLMQSELIEPLPDVLKRYHDLLTLWPETLSSALPISFSHGSVSIDGWLGGLHRNARGELLLVTAIPNSIGSKKTRKWHRLIRPWVNHLVACACELPLHTALVASDETLMLEPLDKDAAITTLNHLLMAWLRGMQEPLPVAVKTAFAWLGQPADKAEAAARKAYEGDGQTTDGERRESTALARQFPDFDALVDSEEFAGWCETLYKPVYDAPWQSLSGGEGGA

SEQ ID NO: 157236 - DNA, 3294 bp, Prochlorococcus marinus str. NATL2A
  CDS (1)..(3294): transl_table=11
ttgctaacaatttatcgaagtaataaagctgaatggttagcagagatacttggacaggaactccgattaaaccctcctgaaataacagaagaagttaatattatcgtaagtacatggccttcaagcagatggctaagtgaaaaactttcaataattaataatatcaatgcattagttaaataccctttccctggtacatatttaaaaagattagtcaagagaattattggtattgatcctgatgaaaaagatccatgggaaaagaatcaacttgtttggaatattttagaattattaccagaattaatgaaagtggaagaagcccaagtaattcgttcctggctagaaataagcgataaaaaagatacgcaaattaatctgaagttatgggatctagcaaacaatattgcagagacatttgatgattacatactttatagacctgaaattatcaaacaatggttaagcaagaaaatgaagaaaaaatctagagaaattagtgttaataaaaatatcctttggcaagaaatattatttaatttattatataaaaagataaacaaagatccgttctgcatccaagtcgaaaaagctattaaacgtttaaagaaagatgatatttctaaactagattatccaaaaaatctatacgtctatggacttagtagtcttgcaccattgcaaatagatttaattcaagcattttcaaaggtaataaatataaaaatttatataatttccccttgcaatgatctttggcaaagatgtgaagcgagaagactgcaatttagaaacacatggaatactcctcccgacaggcaatggttactagaatctccaagacttgaagccttccttggacggatgggggctgaatatcaacagttactagaagggagtggtgaatatcaattgggagatagaaacgaggaagatattttttctcttacagcagatatcgccactaataaagggaacaaaccaaatttattagaacaactacaacaagaattattatcaacaaaaagtgaaaatattttaactaaagaaaaatctgacaaatcactccttttccttaaatctccaggaaagtatcgacaagtggaattaataagagaccatatattacagctcttcagcgatgacataaaaattcaacctagagacattttaataatgacaccacaagttgatagctatgcgccaataattacctcagtatttaataatatagataaaaatactactcagctaccctgggtaatcacagataaaagtcaagaagataaagtaggtttaatacattttgtgttaaatctgtttgagatttccgtatctcgtctaaccgcatcaatttttgaaaacttattaattaatccagcattacgaacgcaacagaatataagtattgacgaggtgagtgacataatcaaaagccttcaatccgctgggtttacttggggacttgattcctcagaaagatatggggaagaaactcatagcctatgttggtgtctagaaaggtttctacttggtcttgttttaccagataatccaattaatggaataagccatatctccccttattccgaaaatatttcaagtgcagagtttacaaaagcttggagtatactttcaaaactttgcaattatatcgatgcgattcgtagtaaacgttcatgtaaagaatggataaaacttataacatcgctcgtaaaggatttatttggagatggtggagaatgggcatgggaagagcaacaactactaactgttgttaataattggggtctcataacagataattgtgaactagaaattgattgtctagtagttaaagatattatcaccaaggcattaagttctacaaatagcaaatttggtcatagaacagggaaaattacgatcagtgccttagaaccaatgagagcaatccctcataaaatcattatcatcatgggactagaaagtagaacttttccaagaatagagaatagaagaagttttaatctcctagaaagaaaaagagagcttggagatccaaatcaatatgataaagaccgctattcattgttagaagctttaatctcaactcgtcaaaatcttttggtttcttggaattcaaaagatgaaaagacaggagaagatcttgaacctccaagccctattcaacaatggctgaattacttaaaaattaaattaggagacaatacctttaaagatattctcattgagccaccagcaaatcctcttgatcatttcaactttataaaaacagaaaattcacaaatcatgagttgtgataggaagaatctagaagctagagaatggcttgaaaaagcaatcccgactaaaaatatctcactagcattaccgctaaagatgaaagaaataaacgtaagcaaattaaaatcttattccttcgagaaaaccaaagaatggttactcaatccgcaaataacatggttaaaagagcatgaaattcaatcaagagaatttgtcaatcttattgaagacaatgattttctggagctttcagaattagaaagatataaacttctaaaacatcgacttcaaagtagtgatctcttaaatattaaccatacaaaaaatgactctaaccactgggaagagaactattctggcaaaggtgttttccccccaaaaggctctggattaatagagaaggatcttcttcaggagcggtggaataatttaatatcagcaatatacgctaccgggcaaatcacgaaaaggagtattgagatgcaagagttagagggtgaattctactttggagggaagaatttaatacagattgaagttggaagtttaaaatataaaacccttatgaatggatggctaaatcatttatatttatctgcaaatagttcatttaattataaaacactgataatttctaaaaaaacagatcatagaaaaacaattcaattcgaagtaagcaaggagatattaccaatcaatacaaaagaagcgaaaaaaattttaagccaaatacatcaattagcaaccgtaggaagaaataattgttggcccataccaccagaaagtggcatggattatgcccttgctacaaaagacaataataagaatgagcaagatttatttcaaaaaaaatgggaaggtgatttatataggcaaggagaaagagagacactagcgatggaactttgttttggcaaaaaatgcaaagcctctacttttttagactttgaatcatttaatgatgtgttgatgactctctatgaaccaatcctcaaaaacaccacctaa

SEQ ID NO: 157237 - protein, 1097 aa, Prochlorococcus marinus str. NATL2A
MLTIYRSNKAEWLAEILGQELRLNPPEITEEVNIIVSTWPSSRWLSEKLSIINNINALVKYPFPGTYLKRLVKRIIGIDPDEKDPWEKNQLVWNILELLPELMKVEEAQVIRSWLEISDKKDTQINLKLWDLANNIAETFDDYILYRPEIIKQWLSKKMKKKSREISVNKNILWQEILFNLLYKKINKDPFCIQVEKAIKRLKKDDISKLDYPKNLYVYGLSSLAPLQIDLIQAFSKVINIKIYIISPCNDLWQRCEARRLQFRNTWNTPPDRQWLLESPRLEAFLGRMGAEYQQLLEGSGEYQLGDRNEEDIFSLTADIATNKGNKPNLLEQLQQELLSTKSENILTKEKSDKSLLFLKSPGKYRQVELIRDHILQLFSDDIKIQPRDILIMTPQVDSYAPIITSVFNNIDKNTTQLPWVITDKSQEDKVGLIHFVLNLFEISVSRLTASIFENLLINPALRTQQNISIDEVSDIIKSLQSAGFTWGLDSSERYGEETHSLCWCLERFLLGLVLPDNPINGISHISPYSENISSAEFTKAWSILSKLCNYIDAIRSKRSCKEWIKLITSLVKDLFGDGGEWAWEEQQLLTVVNNWGLITDNCELEIDCLVVKDIITKALSSTNSKFGHRTGKITISALEPMRAIPHKIIIIMGLESRTFPRIENRRSFNLLERKRELGDPNQYDKDRYSLLEALISTRQNLLVSWNSKDEKTGEDLEPPSPIQQWLNYLKIKLGDNTFKDILIEPPANPLDHFNFIKTENSQIMSCDRKNLEAREWLEKAIPTKNISLALPLKMKEINVSKLKSYSFEKTKEWLLNPQITWLKEHEIQSREFVNLIEDNDFLELSELERYKLLKHRLQSSDLLNINHTKNDSNHWEENYSGKGVFPPKGSGLIEKDLLQERWNNLISAIYATGQITKRSIEMQELEGEFYFGGKNLIQIEVGSLKYKTLMNGWLNHLYLSANSSFNYKTLIISKKTDHRKTIQFEVSKEILPINTKEAKKILSQIHQLATVGRNNCWPIPPESGMDYALATKDNNKNEQDLFQKKWEGDLYRQGERETLAMELCFGKKCKASTFLDFESFNDVLMTLYEPILKNTT

SEQ ID NO: 157238 - DNA, 3453 bp, Pseudomonas fluorescens PfO-1
  CDS (1)..(3453): transl_table=11
atgccggacacccagtccctcaacgctgcattcatggtcgttcagagcaacagcctggatgaactgcgcagccttgtgatcagcatcatgcggcgctatccactggcacccctggagaacgaaattgcgctcgtgcagagcaacggcatcgctcaatggctcaagctggcactggctgaagaccctgaagcggacgactctggcggctgtggtatcgccgccgctattgatgtgcaactgccgggcagtttcatgtggcagctttaccggatggttctggggcgagaggagattccggcaacgtcgctgctcgataaggcaccattgacctggcgcctgatgcgcctgttgccacaggtcatcacccgaccccatttcgaaccgctacaacgcttcctcatccatgacaccgatctgcgcaagcgttaccagttgtccgaacgtctggcagacctctttgaccaatatcaggtttaccgcgctgattggcttgaggattgggcagaggggcatcatcaactacgcaatgtgaggggtgaagcgaagccgcttcctccgaccagttgctggcaggcagagttgtggcgtgccctgctggacgatgtgggcgagcaaggcatggctcaaagtcgggcgggcgtgcaccagcggttcatggagcgcatcaacagtcttgaacgcgcaccgaccggacttccccagcgagtgatcgttttcggaatttcctcgttgccagcccaggtactggaggcattggccgggctttcccgtttcagccaggttttgttgtgcgtccataacccctgtcgttatcactgggccgatatcgttgccgacaaggatctcttgcgccatcagtacaagcggcaagcccgaaaaaacggtatgcccgtagtgctggattcggaaatgctccaccagcatgctcacccgctcctcgctgcgtggggcaagcaaggtcgcgattacatcaaccttctcgacagctatgacgaccccgatagctatcgcgcagcatttcgcaatggacgtatcgatctgttcagcgaaaaccagccgaagaacatgctcaatcagttacaggacgacattctggaactgcggccgctcaacgagactcgagcactctggccggcagtcgatctgactcaagacgattcgatccgctttcatattgcccatagcgcccagcgcgaagtggagattctccacgaccagttgctggcacgtttcagtgccaaccctcaattacgcccgcgcgacgtgatcgtgatggtgcctgacatcgatagttatgcgccgcatattcgcgccgtatttgggcagctggatcgtcatgatccacgcttcattcccttcacgatggccgatcaggggcagcgcggacgggatccattactgatcgctgtcgagcatctgctcaagctgccggatagtcgtttccccgtcagtgaaatcctcgacttgcttgatgttccggcgttacgcgccagatttggtgtgcaggaacgagacttgccgaccctgcatcgctggatcgaaggtgccggcgtgcgttgggggattgatgccgggcaacgggccgaactgggattgcccgacgaactggagcaaaacagttggcgcttcggcctgcgtcggatgctgctcggctatgccgtcggcagttccggagcctgtggggatatcgaaccctacgatgaaatcggcggtctcgatgccgcgttgattgggccattggtagcgttgctggatgcactggagctttcgcatcagcaactgatgaaacccgcccaaccacaggaatgggggcatcggcttcaggcgttgatgcaactgtttttcaagcccgaagatgagcatgacgactacctgctggctcaactcgaggagttgcgcgaaacctggatggaaacctgtgaggccgtcggtctgttggacgagctgccactgaccgtcgtccgtgaggcttggctggcggggctggatcaggggcgtctgtcgcagcgcttcctggccggagccgttaacttttgcacgctgatgccgatgcgcgcgatcccgttcaagctggtttgcctgttgggcatgaacgatggcgattatccgcgcgctcaaccgccgctggacttcgatctcatgggcagcgactaccggccgggagatcgctcccgtcgggaggatgatcgctatcttctgctcgaagcgctcttgtccgcccgtcatcagctctacatcagttgggtcggtcgcagcattcgcgacaacagcgagcggccagcctctgtgttgatcggccagttgcgcgatcatctcgccaatggatggcgatcgagcgacaacaaagaggatctcctgattgccatgactcaggagcatccgttgcagccattcagttcgcgctacttccatgaggaagacaaactgttcagctatgccagcgaatggcaggtgctgcatcaacctcacgaacagaacgacaccgcaacgatgcttgtaccccatatccaggaggagccgttgagtctggaactgctacaggacttcctgcgcaatccggtccgacactttttcactcagcgactcaaggtttacttcgaagcggcgcagatacctcaggctgacgaggaaccctttgtactggatgcgttgcagcgatatatgctcagtgacagcttgctcggagcagccttgagacacccggataatgttgatcaggcactcgagtctcaagcccgacgcctgcagaacagcggcctgttgcccattgccggattcggtgaatgccttcagcgagagctgatcgagcctttgccagacttgttgcagcgatatcaacagttgctggcgttatggccgacacccctgtccaacgccctaccgatcaattttgaatggcaggagctgcgccttgaagggtggctgggcggcttgcaccggcgcgccgatggcggcgtactgtcggtcacgacgatcccgaacagcataggctcgatcaagagccgcaaatggcatcgcctgaccaagccctgggtcagccaccttgtcgcgtgtgccagtgggctctccctgacgaccgcactggtggccagtgatgacacgctccttcttgaacctctggaacagactcgagcgggacgggttcttgaggatctgctgctcgcctggcagacgggtatgcgtcagccacttccggtcgcggtaaaaacggcttttgcatggctggggcagaccgatccagtcaaggctgaagcggctgcccgcaaaacctatgagggtgatggtcagaccagcgaaggcgaacgtcgggaaagcccggctctggcccgacagttccccgactacgatgcactgcaggcggatgaaaccttctccggttggtgtgatgcgctttatcgcccgttgctcgaggcaccttggcactcatggacccacgaggaggcaggcgcatga

SEQ ID NO: 157239 - protein, 1150 aa, Pseudomonas fluorescens PfO-1
MPDTQSLNAAFMVVQSNSLDELRSLVISIMRRYPLAPLENEIALVQSNGIAQWLKLALAEDPEADDSGGCGIAAAIDVQLPGSFMWQLYRMVLGREEIPATSLLDKAPLTWRLMRLLPQVITRPHFEPLQRFLIHDTDLRKRYQLSERLADLFDQYQVYRADWLEDWAEGHHQLRNVRGEAKPLPPTSCWQAELWRALLDDVGEQGMAQSRAGVHQRFMERINSLERAPTGLPQRVIVFGISSLPAQVLEALAGLSRFSQVLLCVHNPCRYHWADIVADKDLLRHQYKRQARKNGMPVVLDSEMLHQHAHPLLAAWGKQGRDYINLLDSYDDPDSYRAAFRNGRIDLFSENQPKNMLNQLQDDILELRPLNETRALWPAVDLTQDDSIRFHIAHSAQREVEILHDQLLARFSANPQLRPRDVIVMVPDIDSYAPHIRAVFGQLDRHDPRFIPFTMADQGQRGRDPLLIAVEHLLKLPDSRFPVSEILDLLDVPALRARFGVQERDLPTLHRWIEGAGVRWGIDAGQRAELGLPDELEQNSWRFGLRRMLLGYAVGSSGACGDIEPYDEIGGLDAALIGPLVALLDALELSHQQLMKPAQPQEWGHRLQALMQLFFKPEDEHDDYLLAQLEELRETWMETCEAVGLLDELPLTVVREAWLAGLDQGRLSQRFLAGAVNFCTLMPMRAIPFKLVCLLGMNDGDYPRAQPPLDFDLMGSDYRPGDRSRREDDRYLLLEALLSARHQLYISWVGRSIRDNSERPASVLIGQLRDHLANGWRSSDNKEDLLIAMTQEHPLQPFSSRYFHEEDKLFSYASEWQVLHQPHEQNDTATMLVPHIQEEPLSLELLQDFLRNPVRHFFTQRLKVYFEAAQIPQADEEPFVLDALQRYMLSDSLLGAALRHPDNVDQALESQARRLQNSGLLPIAGFGECLQRELIEPLPDLLQRYQQLLALWPTPLSNALPINFEWQELRLEGWLGGLHRRADGGVLSVTTIPNSIGSIKSRKWHRLTKPWVSHLVACASGLSLTTALVASDDTLLLEPLEQTRAGRVLEDLLLAWQTGMRQPLPVAVKTAFAWLGQTDPVKAEAAARKTYEGDGQTSEGERRESPALARQFPDYDALQADETFSGWCDALYRPLLEAPWHSWTHEEAGA

SEQ ID NO: 157240 - DNA, 3339 bp, Burkholderia sp. 383
  CDS (1)..(3339): transl_table=11
atgctccatctcttctattcgaaccatcacgaaacgctagccgacgcgctgctcgaggatctggccgcgttcccggcccgcaacggcccgtgggcgcagcagcaggtcatcgtgccgagcgcggcgttgcgccgccgtctcgaactcgacatcgccgcgcgcaacggcgtgtgcgcgaacgtcgagttcacgtatctcgcgcaatggctgtgggcgcagatcggccgcgtgatggacgtacccaagcgttcgccgtttgcgcccgaccgcctcgtgtggcgctgctaccggctgtttgcgcaggcgcccgacgggacgccgtggctggcgtcgccgcggctggccgcgtatctgtccgcgtccgacgatgcgatgcgctacgagcttgcacaccgcgtcgcggccgtgctcgatcattacctgacctatcgccccgaatggctgtccgcatggcaggccggcgagtccgtgctcgcgggcgacggcgcgccgcgcgggatcagcgacgccgcacgcgacgacgagcgctggcaggccgcgctgtggcgcgcgctgctcgccgagctgagcgacagcggcacgccgccggcgcaccgttttctcgtcgaggcgcggcatctcgatgccgaaaccatcgcgcacgcggactggccggaatcggtcagcgtgttcgcactgccgacgatgccgccgctgcacgtcgcgttgctgcgcgagctgtcgcgctggatcgacgtgcgcgtctatgcgctgaacccgtgccgcgaattctggttcgacatcgtgaccgccgcgcatgccgatgcgctcgatgcggccgggcggctcgactaccaggaagtcggccatccgctgctcgccgaatggggcaggcagacgcaggcgcagctgcacatgctgcacgaactgactgaaagcgccgcgtcgggcgacgcgtcgcgtttcgtcgagaatcccgcgtcgacctggctcgcgcgcgtgcagaacgcgattctcgaactgcagccggaggctgacgtaggcgacacgccggccgagcgcgggatcgaggtgcacgtgtgccacagcctcgcgcgccagctcgaggtactgcacgaccggctgctcgcgtggttcgacgccgacgcgagcctgcagccgtccgacgtgctcgtcgcggtggccgatctcgcggcggccgggccgctgatcgacgccgtgttcggcacggccggcgccggcggctcgcgcgtgccttaccggatcaccggcctgccgccgtcgcaggcgaatccggtcgcgcgcgtgctgctcgactggctcgcgttgccggagcggcaggtcggcgcgcccgagctggtcgaatggctgcgcgtcgacgcggtggcggcgcgctacggcatcgatgcggcggcgctggagacggtgcagacctggctcgcggccgccggcgcgcggcgcgggctgtcgccgctcgcgagcgacgacgcggcggtgccgtcgccacgccatacgttctccgatgcgctcgcgcggctctttctcggttatgcgatgccggaaggcgcggcgccggtcggcgcgtggctgccgatcgaggcggccaccggcagcgaggccgaactgctcggccggctcgcgcgcttcaccgacgatctcgacggcttcgcgcggcggctggccgaatcgcatacgccgcaaggctggagcgagctgttcgccgatacgctcgcgcgtttcttcgattcgggcgccgcgtatgcggacgcgctcgcgggggtgcgcgacgcgctcgacgcgatgctggcggcgatgacggagggcgcgcccgacgaagcgttgccggcggccgtcgtccgggcggggctggccgctgcgctcgacgatccggcgcgcggcggtgtgccgtggggcggggtcacgttctcgtcgctgacgagcctgcgcggcctgccgtatcgcgtcgtctgcctgctcgggatggacgatggcgtgctgccgagcctcgcgcgtgccgatgaattcgacctgatggccgtgttgccgaaactcggcgaccggcagcgccgcgacgacgagcgcaacctgtttctcgacctgctgctcgccgcgcgcgaccggctgatgattgcgtacacgggccgcagcattcgcgacaacgcgccgttgccgcccgccgcactcgtcgacgaactgctcgaccacctcgcactcgtcacggccgggcccgacgcgccgccggacgcggtcgatgccgcgcggcgcgcattcgtcgtcgagcatccgctgcaaccgttcgcggccgcgtatttccagcccggcagcgaactcgtttcctacgacgccgagcgtgcgacgctcgcgacgctgctggcggccgaggcatcgcacgacgggccgcgcgagctaccgttcttcgcgcagccgctgccggccgaaccggtcgagccggtcgcattcagcgaattcgagcgcttctggcggcatcccgcgcgtgcgctgctgcgcgcgcggctcggcatcgtgctcgccgacgcgcaggccgaactgctcgacaccgagccgttcgcgctcgatttcgccggcagcgatgcgctcgccgagcgcgtgctgccgttgctgatcgaatcggacgagggcggcgtgcacgatcacgcgctgcgcattgcggacgcgagccccgaactgccgggcggcgcgacgggcgccgtgtggcgcgaccaggcgcttggctcgatgacgcagctcgcatcgaacgtgcgccgcgcgctggccgacgggatggagcggcggccgttctcgctcactgtcgtgcccgcctggcccgacacggaacaggcgctgttcggcgccgacgacgcgctgctgtcgggcgacgcggtgagcgcgccgctcgaactgcacggcacgctgaaccggctcacgccagccgggcagatcatctaccgctatgcgcggccgagtgcgcgcgactacctgtccgcgtggctcgagcatctcgtctactgtgcggtggatcctggcggcccgcgccgcacgctgtggttcggcagcggcggtgcattcgagctgacgcccgtcgcggcgccgctcgagcagctcgccccgctggccgcgctgtttcgcgcggggcggcgcatgccgctgcggtttttcccgcgcagcgcgtgggcgcgggtgtccgacggcgaagccaaggccgcaagcgtctggatcaacgagcgggtcgtgagcgaggctgacgatccggccatcgcgatcgcgtggcgcggggcgcatgcatcgctcgacgagccgttcggcacactcgcgcggctcgtgttcgatccgctcgtcgagcatctgaaggaggttgcatga

SEQ ID NO: 157241 - protein, 1112 aa, Burkholderia sp. 383
MLHLFYSNHHETLADALLEDLAAFPARNGPWAQQQVIVPSAALRRRLELDIAARNGVCANVEFTYLAQWLWAQIGRVMDVPKRSPFAPDRLVWRCYRLFAQAPDGTPWLASPRLAAYLSASDDAMRYELAHRVAAVLDHYLTYRPEWLSAWQAGESVLAGDGAPRGISDAARDDERWQAALWRALLAELSDSGTPPAHRFLVEARHLDAETIAHADWPESVSVFALPTMPPLHVALLRELSRWIDVRVYALNPCREFWFDIVTAAHADALDAAGRLDYQEVGHPLLAEWGRQTQAQLHMLHELTESAASGDASRFVENPASTWLARVQNAILELQPEADVGDTPAERGIEVHVCHSLARQLEVLHDRLLAWFDADASLQPSDVLVAVADLAAAGPLIDAVFGTAGAGGSRVPYRITGLPPSQANPVARVLLDWLALPERQVGAPELVEWLRVDAVAARYGIDAAALETVQTWLAAAGARRGLSPLASDDAAVPSPRHTFSDALARLFLGYAMPEGAAPVGAWLPIEAATGSEAELLGRLARFTDDLDGFARRLAESHTPQGWSELFADTLARFFDSGAAYADALAGVRDALDAMLAAMTEGAPDEALPAAVVRAGLAAALDDPARGGVPWGGVTFSSLTSLRGLPYRVVCLLGMDDGVLPSLARADEFDLMAVLPKLGDRQRRDDERNLFLDLLLAARDRLMIAYTGRSIRDNAPLPPAALVDELLDHLALVTAGPDAPPDAVDAARRAFVVEHPLQPFAAAYFQPGSELVSYDAERATLATLLAAEASHDGPRELPFFAQPLPAEPVEPVAFSEFERFWRHPARALLRARLGIVLADAQAELLDTEPFALDFAGSDALAERVLPLLIESDEGGVHDHALRIADASPELPGGATGAVWRDQALGSMTQLASNVRRALADGMERRPFSLTVVPAWPDTEQALFGADDALLSGDAVSAPLELHGTLNRLTPAGQIIYRYARPSARDYLSAWLEHLVYCAVDPGGPRRTLWFGSGGAFELTPVAAPLEQLAPLAALFRAGRRMPLRFFPRSAWARVSDGEAKAASVWINERVVSEADDPAIAIAWRGAHASLDEPFGTLARLVFDPLVEHLKEVA

SEQ ID NO: 157242 - DNA, 3246 bp, Synechococcus sp. CC9605
  CDS (1)..(3246): transl_table=11
ttgctgacggtttaccgaagcaacagggctgaatttctggctcgcttgctctcccgtcagttgatcgagcagcagccgggcccccttgagacggtggaggtgatggtcaacacttggcccaccagccgatggttgggggaacagctggccacggccaatggcatcagttccctggtgcggttccccttcccgggcagtcgcctgcggcagctggtgcgccaggtgctgcatcttcctgctcaggaggacgatccctggcgggcgggccagctggtgtgggcggtgctcgagttgctgccggagctgctggagcagcccgtcgcccagccgttgcgggtttggctcgcccagcgtgaaggaaccgcctcggggttgacgcgggatcggtggcagttggcccgttccatcgccgatgccatggacgattacgccctttaccgccccgatcaactcgagcagtggaaacaaccgcggcctgatgacgactggcagcctgtgctctggcgactgctggcccaacggctgccccgggctccctttggcctgcaggtgcgtgaggccgtcgagtgtctccggcgaggagatgttgatccggccctgctgccggagcggctgcggctcttcggcatcagtgctctggcgccggtgcaggtggatctgattcaggccttgtccggtctgctggcggtggagatctacctgctcaccccgtgtccggatctatggcagcgctgcggcagtcggcgcgcctcgctcggggatgaatggctgatccctccggatgggggatggttggcggaggcgccgcgtttggaggccgttctcgggcggatgggcgccgaatttcaacagttgctggagggctccggtgaagcgcagctgggggagcgccgcgagggagatctgtttgcaggttctctgcagatcgccgcggcggaagagcgtcagcccaccttgctcgatcagcttcagcagcagctggtggatgccgagagcatcgctgagctgaatcgttcctcagacgatcaatctctgttgtttcaggcggcaccggggccttggcgggaggtgcaactggtgcgggatcgcatcctgcagtggctggcggccgatcccgatctcgagccccgcgacgtgctggtgatgacgccgcagatcgagcgctatgcgccgctgctcagctccgtgttcaacgacacggcggctttcggtgtcgatttgccctggcgcctcaccgaccgcagtcagcagagcagtccggggttgtcgatggcgatgttcacgctgctggagctggctgcgacacgcctcaccgccacggggctggaacgtctgctggccaacccggccttgcagggccagcagggactcacgccggaagaggcggtgttgatcacgcaaacactgcaacgcagcggttttcgctggggcttggacgcccgtgagcggggcggtgacgaggtgcacagcctgcgttggtgtctcgaccgttggctgctgggtctggtgctgccggtggagccgggtctggctccggcaggggcggcacccttccagcaggagctggaccccgatcgcctggtgcgttggtggacgctgctggatcgtgtggcgcggatgcttgatcgccttagggagccccggccgtgccatggctgggtggagctgctccaatccctgttgcaggagctgttcgctgagggcggggcctggactgatgaggcgcagagctgggcggcggcgctggaggagtggcggctgcgggcccatgactgccctctggacctcgacgctgccgtggccttggaggtgctgcaggaggccttgtcggtggacagcggccgcttcggtcaccgcagtggtgccctcaccatcagtgccctggagccaatgcgggcgattccgcacaaggtggtgatcttgatgggcctcgacagcgccgactttccgcgcccaagccgccgtccgggctttcatctcctcgagcagcaacggcgcctgggggatccccgcagcagcgaccaggaccgctacgtgctgctggaggctttgatgtcggcacgccgtcatctgctgatcagctggtgcgggcggctggagcgcaccggtgagcctcagccgcctgctgcgccggtggaacagtggctgtcagtgctgcaggagcagttgcaacgggccggtgcctccacggaagggttgttggtcacgccggcggccaatcccctctcccgtgagaacttccggcccgaggcaccgctcagctgtgatcggcgtcagctggaggcccggcgctgcctggatgctgctccggcttcagtcccgaatccccaggggctggcctgggcatcgctctggcagccggagatcaacgatgacgaggccgagggacgggatggagacgatctagccctggaccctgaagctttgctggcctggttgcagcagccccagaaggcctggttgcaggcccgggggttgcggcctggggaaggcattgaggcggtggaggatctcgaggcgctcgagttggagggcctgcagcgctatctgctgctcaaccacgagcttgaggagcagttcattcttggatcggctccggattggacggcgtcgctggcggggcagggtgtgctgccggcgggggctggggcggcccttgagcaggaggaactgcagcagcgttggcaggccctgcaacggcagctggcatcactcggcccctgccgcagggaggtgccggtgctcgccggcctgccgatgcccctgctctacgccggtgacacccaggtggtggtccagcccgggatgctcacggccgcggcggtgatgcgcggctggttgcagcacctgttgctttgcgctgagggatcggctcctgcagccggttcagcggtggtggcgcgcagcacccgggttgccggcgccgaggtgcacgtgcgctggtcggttttgccgacggttgaggccgaagaccagctgcagcagctggcgcggctggcgcgacaggggctggagcggtgctggccggtccctcccaagagcggctggcagatggtggccaaagagcggcgcaaaccgggggaggggcagcaggacttccgcaagacctggcaggacgaaggggccaccccattgatgcagctctgcttcggctcggacgtcgctgcggagcaattgatggatcaggccggattccagcaggcgtgtcagctgttgtacggcccccttatggcgaacctgcgttag

SEQ ID NO: 157243 - protein, 1081 aa, Synechococcus sp. CC9605
MLTVYRSNRAEFLARLLSRQLIEQQPGPLETVEVMVNTWPTSRWLGEQLATANGISSLVRFPFPGSRLRQLVRQVLHLPAQEDDPWRAGQLVWAVLELLPELLEQPVAQPLRVWLAQREGTASGLTRDRWQLARSIADAMDDYALYRPDQLEQWKQPRPDDDWQPVLWRLLAQRLPRAPFGLQVREAVECLRRGDVDPALLPERLRLFGISALAPVQVDLIQALSGLLAVEIYLLTPCPDLWQRCGSRRASLGDEWLIPPDGGWLAEAPRLEAVLGRMGAEFQQLLEGSGEAQLGERREGDLFAGSLQIAAAEERQPTLLDQLQQQLVDAESIAELNRSSDDQSLLFQAAPGPWREVQLVRDRILQWLAADPDLEPRDVLVMTPQIERYAPLLSSVFNDTAAFGVDLPWRLTDRSQQSSPGLSMAMFTLLELAATRLTATGLERLLANPALQGQQGLTPEEAVLITQTLQRSGFRWGLDARERGGDEVHSLRWCLDRWLLGLVLPVEPGLAPAGAAPFQQELDPDRLVRWWTLLDRVARMLDRLREPRPCHGWVELLQSLLQELFAEGGAWTDEAQSWAAALEEWRLRAHDCPLDLDAAVALEVLQEALSVDSGRFGHRSGALTISALEPMRAIPHKVVILMGLDSADFPRPSRRPGFHLLEQQRRLGDPRSSDQDRYVLLEALMSARRHLLISWCGRLERTGEPQPPAAPVEQWLSVLQEQLQRAGASTEGLLVTPAANPLSRENFRPEAPLSCDRRQLEARRCLDAAPASVPNPQGLAWASLWQPEINDDEAEGRDGDDLALDPEALLAWLQQPQKAWLQARGLRPGEGIEAVEDLEALELEGLQRYLLLNHELEEQFILGSAPDWTASLAGQGVLPAGAGAALEQEELQQRWQALQRQLASLGPCRREVPVLAGLPMPLLYAGDTQVVVQPGMLTAAAVMRGWLQHLLLCAEGSAPAAGSAVVARSTRVAGAEVHVRWSVLPTVEAEDQLQQLARLARQGLERCWPVPPKSGWQMVAKERRKPGEGQQDFRKTWQDEGATPLMQLCFGSDVAAEQLMDQAGFQQACQLLYGPLMANLR

SEQ ID NO: 157244 - DNA, 3183 bp, Geobacter metallireducens GS-15
  CDS (1)..(3183): transl_table=11
atgccccttttcctctactccagcaaccggatggagcaccttgtcgaccggcttgtcgaggtgttgcggcgccccttggccgcccccctggcgccggaggtgatcgttgtccagagcaaggggatgcagcgctggctctccatggagctggcaacggcaaccggcgtctgggccaacggtgcctatccgttccccaatgcctttgtctgggacctgttccggaaggccctgccggatctccccgccgcatcccccttcgacccggcggtgctgtcgtggcggatcatggggctgctctccggtttcctggaccagccggcttttgcacccctggcgggatacctggcaggggaggagcgggagctgaagctctaccagcttgccgggaagatcgccgacaccttcgatcagtacacgatcttccgtcccgacatgatcgcccgctgggaacagggaaccgaggaccactggcaggccgtcctctggcgcgccctggcgggggaggggagagggctccaccgggaggcggtgcgtagcgaattcttccggcgcctggcccggggagaggtggacacggcgcttttcccggagcggatcaccgtcttcggcatctcgtacttaccccagttccacctggatgtcttccggcgcatcgccgatttcaccgaggtgaacctctttgtcatgggcccctgccgggagtactgggccgacatcctccccgagcggatcatcgcccggctctctccggaggagcgggaggtgcggatcgaggggaaccccctcctggcctccctggggctcctggggaaggagttttccgataccctcgtggagctgggcgccacggccggcggcgacaccgacctctacggcgatgcccccgacacgaccctcctcggcatggtgcagaacgacatcctccgcctggaggggagcagcggcgaccagcgccccgtggacgcggcggaccgctccatcctgatttcatcctgccacagccccatgcgtgaggtggaggtgctccacgacaccctcctgaacctctttgcctccgcggacgatctcaccccccgcgatatcctcgtcatgacgccggacatcgagacctacgccccctatatctccgccgtgttcgacgggtgccgggacccgcggctgaagattccctactccatcgccgaccggagcatccggagggaaggggggcttgcggagacgttcctggcaatcctcgacctttccggcaagcggttcccggtgaccgcggtcacggagatcctggcctcctccccggttcacggccggttcggcctcgatgccggccatctggaactgatccgcacctggctggaggagacccgcatccggtggggaatggacggtgaggagcggcgccgtgccgggtttcccccctaccgggaacacagctggcgggccgggctggaccggctcatcctgggatatgccatgccagaggaggatggccggatggtggaggggattctccccttcgacgccatggaaggggagggaccggcggtcctgggacggtttgcgggcttcgtggaagggctccacgccttggtggacgaactggaccgcccccgcaccctgacggagtgggtgcggctctgccggcggattctcgacgactttttcgcccctggggaggagggggcttttgacctggccaccctgaacggcattctcaccgagttggagacggtgcgggacgaggcgggattcggcggcgcggtggcgctgccggtgatccgcgcctggctccggggacggctcgaccgggaggtgcgggggctcggcttcatgaccggcggggtcaccttctgcgccatgcttcccatgcggagcatccccttcaaggtcatcgcgctccttggcatgagcgacggtgctttcccccgccggaacaccccccccggcttcgacctcatagcccgggaccggcggcggggagaccgctccctgcgggacgaggaccgttacctcttcctggaggcccttctgtcggcccggcggcattttatcatcagctacacggggcagagcatccgggacaacagcacgcttcctccatcggtcctcgtggacgagtttctcgactacctggggcgccgcttctcggacggcactccggacttcccgaaaaaactcgtgagcaagcaccggcttcaacccttcagcccgacctacttcaccggcgacggcacgcttttcagctactcggaggagaactgccgggccgtggcccaacgcctgaagggtgccgtggcggtacctaccttcatcaccgagcccctgccggagcctccggatgaactgctgacggtctccctttcagctctcctttacttcttcgataacccggcccgctacttcgtgcggacccggctcggcatccggctcgacgagcttccgcctcccctggaagaccgggagccctttgccattgattccctcgacgcctaccggctcagggaagagatgctggacctggccctggcgggacgggaaccgcgggaaacctttgccgtggcccgggcccgggggatactgccgccggcccgccagggggagctcctgttccgggggcttggcgacggagttgaggatctggctgcacagatcagggcgctgaccggtggaaggtcgccgctggatcctctccccgttgaccttgccctggggccttaccggatcaccgggatgttgggggatatctggcccgtggcgcttctgcgccataagggggcgaaatgttcggggcgcgatcaggtacggctctggatcgagcatctgctgctgaatcttctcgcccaggaggggtatccggccgcaagcatccttgttgcaaccgatgtttccctgcggtttgagccggtgccgaatcccatggtgcacctggagacccttctcggcctctacgggcaggggctccgggagccgctccggttcttcccccgcacggcggcggcctatgcggtaaagggagagctttccgctgcccgcaacgcttggggaggggagttcttccccgagggggacgacccctactaccgcctctgcttcggcggcatcgaccccctcgacggggaattcgagcggatcgcccgggcggtattcggccccctgaacgagcatcggcagggcaagggggagtaa

SEQ ID NO: 157245 - protein, 1060 aa, Geobacter metallireducens GS-15
MPLFLYSSNRMEHLVDRLVEVLRRPLAAPLAPEVIVVQSKGMQRWLSMELATATGVWANGAYPFPNAFVWDLFRKALPDLPAASPFDPAVLSWRIMGLLSGFLDQPAFAPLAGYLAGEERELKLYQLAGKIADTFDQYTIFRPDMIARWEQGTEDHWQAVLWRALAGEGRGLHREAVRSEFFRRLARGEVDTALFPERITVFGISYLPQFHLDVFRRIADFTEVNLFVMGPCREYWADILPERIIARLSPEEREVRIEGNPLLASLGLLGKEFSDTLVELGATAGGDTDLYGDAPDTTLLGMVQNDILRLEGSSGDQRPVDAADRSILISSCHSPMREVEVLHDTLLNLFASADDLTPRDILVMTPDIETYAPYISAVFDGCRDPRLKIPYSIADRSIRREGGLAETFLAILDLSGKRFPVTAVTEILASSPVHGRFGLDAGHLELIRTWLEETRIRWGMDGEERRRAGFPPYREHSWRAGLDRLILGYAMPEEDGRMVEGILPFDAMEGEGPAVLGRFAGFVEGLHALVDELDRPRTLTEWVRLCRRILDDFFAPGEEGAFDLATLNGILTELETVRDEAGFGGAVALPVIRAWLRGRLDREVRGLGFMTGGVTFCAMLPMRSIPFKVIALLGMSDGAFPRRNTPPGFDLIARDRRRGDRSLRDEDRYLFLEALLSARRHFIISYTGQSIRDNSTLPPSVLVDEFLDYLGRRFSDGTPDFPKKLVSKHRLQPFSPTYFTGDGTLFSYSEENCRAVAQRLKGAVAVPTFITEPLPEPPDELLTVSLSALLYFFDNPARYFVRTRLGIRLDELPPPLEDREPFAIDSLDAYRLREEMLDLALAGREPRETFAVARARGILPPARQGELLFRGLGDGVEDLAAQIRALTGGRSPLDPLPVDLALGPYRITGMLGDIWPVALLRHKGAKCSGRDQVRLWIEHLLLNLLAQEGYPAASILVATDVSLRFEPVPNPMVHLETLLGLYGQGLREPLRFFPRTAAAYAVKGELSAARNAWGGEFFPEGDDPYYRLCFGGIDPLDGEFERIARAVFGPLNEHRQGKGE

SEQ ID NO: 157246 - DNA, 3450 bp, Burkholderia thailandensis E264
  CDS (1)..(3450): transl_table=11
atgcgccggatcggccgatcggccaggttctcgcgcccgtctccctttgctatccttggctcctcgattggccgggcgtccacccggcgtccttcacctggtttcatgctccatctcttctactcgaaccgccacgaaacgctggccgccgcgctgctcgacgatctcgccttcgcgtcggacggcgcgggcccctgggccgcgcagcaggtgatcgtgccgagcgcggcgctgcgccggcggctcgagctcgacgtcgcgaagcggcacggcgtgtgcgcgaacgtgcgcttcagctatctcgcgcaatggctgtgggcgcagatcggcgaggtgctgacggtgcccgcgcactcgccgttcgcgcccgatcgtctcgtctggcgctgctaccggctgctgtcggacgacggcgccgcgccgtggcgcggctcgccgcggctcgccgcgtacctggccgcggccgatgcgccgatgcgccacgagctcgcgcagcggatcgcgacggtgttcgaccactacctcacgtatcgcccggaatggctcgcgcaatggcaggacggcgaatcgatcttcgcgctcgaaggcgcgccgcgccacggcggcgaggccgcacgcgacgacgaggcgtggcaggccgcgctctggcgcgcgctgctcgcggagctgtccgacagcgggatgccgcccgcgcaccggttcctgcgcgaggccggcacgttcgatcccggcgtgatcgcgcacgcgcaagcgaagtggccggatgcggtcagcgtgttcgcgctgccgacgatgccgccgctgcacatcgcgctgctgcgcgaactgtcgcgctggatcgacgtgcgcatctacgcgctcaatccgtgccgcgagttctggttcgacatcgtcacggccgcgcgcgtcgagtcgctcgacgcggcggaccagctcgactatcagcaagtcggtcacccgctcctcgccgaatggggcaggcagacgcaggcgcaattgcacatgctgcacgagctgaccgagagcgcggcggcgagcgatgcgtcgcgctacgcggagaatcccgcgccgacgtggctcgcgcgcgtgcagaacgcaattctcgatctgcagccggaggatgcgctcggcgcgccgctcgccgagcgcggcgtcgaagttcacgtgtgccacagcctcgcgcgccagctcgaggtgctgcacgaccgcctcctcgcgtggttcgacgcggacccgagcctcgcgccgtcggacgtgctcgtcgcgatgccggatctcgcggcggcggggccgctcatcgacgccgtgttcggcacgtcgtcgggcgccgacgccgcgcgcatcccgtaccggatcaccggcctgccgccatcgcacgcgaatcccgtcgcacgcgtgctgctcgactggctcgcgctgcccgagcgcaacgtcggcgcgccggagttggtcgagtggctgcgcgccgacgcgatcgccgcgcgctacgggattgacgcgacggcgctcgaaaccgtgcagacgtggctcgccgcgtcgggcgcgcggcgcgggctcgcgcccgacgcggtcgagccgccgaacgccgccgtgcccgcgccgcgccacacgttcgccgatgcgctcacgcggctgttcctcggctatgcgatgcccgacggcgcggcgcccgtctcgacctggctgccgatcgcgggcgcggagggcggcgaggccgagctgctcggcaggctcgcgcgcttcaccgacgatctcgacggtttcgcgcaacgcatcgcccgcgacttgacgccgcaagactggggcgacgtgttcgccgatgcgctcgcgcgcttcttcgattcgggcccggcgttcgccgacgcgctgtccggcgtgcgcgacgcgctcgacgcgatgctcgccgcgatggcggaaggcgcgggccgcgccgaattgccggccgccgtcgtgcgcgcgggcctcgcggccgcgctcgacgatccggcgcgcggcggcgtgccgtggggcggcgtcacgttctcgtcgctcacgagcctgcgcgggctgccgtatcgcatcgtgtgcctgatcgggatggacgacggcgtgctgccgagcctcgcgcgcgcggacgaattcgacctgatggccgtgttcgcgaagctcggcgaccgccagcggcgcgacgacgagcgcaatctgttcctcgacctgctgctcgccgcgcgcgatcgcctgctgatcgcgtacacgggccgcagcatccgcgacaacgcgccgttgccgcccgcggcgctcgtcgacgaactgctcgaccatctggcgacggtgtccgccgggcccgacgcgtcacccgacgcggtcgacgccgcgcgccgcgcgttcgtgatcgagcatccgctgcaaccattctcggccgattacttcgcgccgggcggcgcgcttttcacgtacgacgcgtcgcgtgcggcactcgcgcgcctgctcgccgaaggcgggcgggcgcaggcgctcccgttcttttcggaaccgctgcccgccgagccggcggagcccgtcgctttcgcggatttcgagcgcttctggcgccacccggcgcgctcgctgctgcgcgcgcggctcggcatcgtgctgtgggatgcgcaggcggagctcgtcgataccgagccgttcgagctcgattacgcgggcagcgacgcgctcgccgggcgcgtgctcccgcttctgatcgagacggccgatgcgggcgcgttcgagcatgcgctgcgcgtcgccgatgcaagccccgaggtgcccggcggcgcgacgggcgcggtgcggcgcgaccatgagctcgacgcgctcgcgcagctcgcgggcaacgtgcggcgcgcgctcgccgacggcgcggcgcgcgtgccgttcgcgctcgacgtcgcgcccgcgtggcctgcggcgggcgacgcgccgtggttcggcgagcatgacgccgcgcttgcgtcggccgcgacgcgcgagccattgcgcctgcacggcgcgctcgcgcggctgacggcggcgggccaggtgatctaccgctatgcgcggccgggtgcgcgcgactatctatcggcgtggctcgcgcatctcgtctattgcgcgatcgatcccgccgggccgcgccgtacgctgtggttcggctgcggcgacacgttcgaattcgcgcccgtcgccgcgccgctcgagcagctcgcgccgctcgccgcgctgtttcgcgcgggacgccggatgccgctcgcgtttttcccgaggagcgcgtgggccctcgtgtcggagagcgaatcgaaggcggcgggcgtgtggatcaacgatcgcgtcgcgggcgaggccgacgatgcggcgctcgcgctcgcgtggcgcggcgcgaatccttcgctcgacgagccgttcggcgcgctcgcgcatctcgtgttcgatccgctcgtcgagcatctgcggagggcgtcatga

SEQ ID NO: 157247 - protein, 1149 aa, Burkholderia thailandensis E264
MRRIGRSARFSRPSPFAILGSSIGRASTRRPSPGFMLHLFYSNRHETLAAALLDDLAFASDGAGPWAAQQVIVPSAALRRRLELDVAKRHGVCANVRFSYLAQWLWAQIGEVLTVPAHSPFAPDRLVWRCYRLLSDDGAAPWRGSPRLAAYLAAADAPMRHELAQRIATVFDHYLTYRPEWLAQWQDGESIFALEGAPRHGGEAARDDEAWQAALWRALLAELSDSGMPPAHRFLREAGTFDPGVIAHAQAKWPDAVSVFALPTMPPLHIALLRELSRWIDVRIYALNPCREFWFDIVTAARVESLDAADQLDYQQVGHPLLAEWGRQTQAQLHMLHELTESAAASDASRYAENPAPTWLARVQNAILDLQPEDALGAPLAERGVEVHVCHSLARQLEVLHDRLLAWFDADPSLAPSDVLVAMPDLAAAGPLIDAVFGTSSGADAARIPYRITGLPPSHANPVARVLLDWLALPERNVGAPELVEWLRADAIAARYGIDATALETVQTWLAASGARRGLAPDAVEPPNAAVPAPRHTFADALTRLFLGYAMPDGAAPVSTWLPIAGAEGGEAELLGRLARFTDDLDGFAQRIARDLTPQDWGDVFADALARFFDSGPAFADALSGVRDALDAMLAAMAEGAGRAELPAAVVRAGLAAALDDPARGGVPWGGVTFSSLTSLRGLPYRIVCLIGMDDGVLPSLARADEFDLMAVFAKLGDRQRRDDERNLFLDLLLAARDRLLIAYTGRSIRDNAPLPPAALVDELLDHLATVSAGPDASPDAVDAARRAFVIEHPLQPFSADYFAPGGALFTYDASRAALARLLAEGGRAQALPFFSEPLPAEPAEPVAFADFERFWRHPARSLLRARLGIVLWDAQAELVDTEPFELDYAGSDALAGRVLPLLIETADAGAFEHALRVADASPEVPGGATGAVRRDHELDALAQLAGNVRRALADGAARVPFALDVAPAWPAAGDAPWFGEHDAALASAATREPLRLHGALARLTAAGQVIYRYARPGARDYLSAWLAHLVYCAIDPAGPRRTLWFGCGDTFEFAPVAAPLEQLAPLAALFRAGRRMPLAFFPRSAWALVSESESKAAGVWINDRVAGEADDAALALAWRGANPSLDEPFGALAHLVFDPLVEHLRRAS

SEQ ID NO: 157248 - DNA, 3342 bp, Syntrophus aciditrophicus SB
  CDS (1)..(3342)
atgaaaggattgaacattattgcaagcaaccgcatggaggttctggctgaaaagctggccgatgttctggccgggcctctttcttcaccgctgactccggaaatcattgtcgtccagagccggggaatggaacgttgggtttccatgcaactggccgcttttcacgggatctgcgccaatgtccggtttccctttccaaggagaatgattcaggacattttccatgccgttctgccgggttgggaggcagaacaggatttcaatccggagcttgcggcctggcgtatcatgagcctgctgaccgttgcgtcatcgcgccctggttttgaacctctggcagcatacctccatgacgattctcaagggctgaaacgctttcaattgtcgcgtcagattgcccgacttttcgatcaatatctgattttccgtccggaaatgatccttaactgggagaaaagaatttccgatggagacgaatattcctggcaggcggatctctggcggcttttcgtagaggagggaaagatcgtccacccggcggtactccgcctctctctgcaagatgtcatgatccggcggggaaatcaactctccgcttgcctgccggaacgcatctcgatatttggaatctcctatctgcctcctttttatctggatatctttcttgctgtttcgtctttcatggaggttaatttctttctcctgaatccatcccgtgaattctggttcgacatccgttcctcccgggagatttcccgggaagtgaaactggttaagggcagcgttgagaaaggaatggagaatgaggaattgtcccgtagtgagctctatctggaagagggcaacagtctgctggcctccctgggcactctgggacgggagttctggtcttttctgggcgaatgttcaggccgggaagaggagtattatgtcgaaccgggcgaaacctcgcttctccacgcgattcagtccgacattctgaatctccgggagggcggaggggaggccgatgcggacggccgagaggtcatgttttccgaggaaagatctctgcagattcatgcctgccacagtccaatgcgcgaagttgaagtgcttcacgattccctgctggaccttctggaagccgatccatcccttcaaccccatgacatcgtggtcatgacaccggaaatcgaaacttacgcgcctttcattacggcggtattcgagacagtcgatgaggatgcgcccggtctggtcgatcagccgaaaatcccttaccatattgtcgatcgcgccacgatcagtgggagaccggttctgggaggactcctgaaaatccttgatcttccattagggcggtttgccgccggcgaggtgctctcactactggaggttgccgctattcgcaaccggttcggcttgactgaagccgatatcgatcaggtttcgcgctgggttgccgacagcggcatccggtggggaatcgatgaacgcagccgtctgcgggaggggttgccggaaatcgccacaaattcctggcaatggggactgaagcgtatgctgctgggttatgcccttccggccagaaacaatgaacttttctccggaattatgccctgtgagacggcggaaggaagcgaggcccggctcctcggcattctggcggaattcacagaacggctgtttctgacagcggaaagcctgagtcaggatcgcacgctttcggactggggcagtctccttgacgatatctctgatcgttttttcctgggagatgaggactctgaaccggatatccggaatctacgtcaacttgcttccgatctcaaaaatcttcaggaaaaaaccggatttccggagaaaatcagccttgccatcgtgcggtccttcctccaggatcggtttcaggcaacgggagccgatggcgggtttctcagccggggtgtaaccttctgctctctccttcccatgaggagcattcctttccgggtgatctgcctgatgggaatgaacaatggggactacccgagacggccgcagacgcccagtttcgaccttatggccaggcacccccggcggggcgaccgttcccggaggaacgacgaccgctatctttttctggaagcccttctttccgcccgcgatacgctttatatcagttatgtagggcagagcatggaagacaacagcagaatccccccatccgtggtcgtgagcgaacttctggattatgtccgccgcggatttgttttgaaagactgcaatatcgatgagttactgatcacataccatccccttcaggctttcagcccggtctgttttaccgaagaatcgtgccggctcttcagttattccgaagagaaccgcaaagcggcaaacaccctgctcaagcgttcgtccctgacttcgataccgggtgccgaagcggaaaggcttccggaagatccggcaatggctacgcaggcaaccattcgggatctgatcgccttcttccgtcatcccgcaagattttttctgcagagaagactggccgtctttctgggggaggcggacatcgtactggaggagaatgaacacttcgatgtagaggggcttgaccggtacggcattgaacagcttctgatggaaaaggaaatcgaaacgggacacatggaggaagtttatccggtgctcgccgcgcaggggctccttccccatggggctgtgggtcagtcccggttcgatgccttaaagcgcgatatttgccattttgttcgtagttataagcatattctgcactcggaaaacattcctccccgcgacatcgatctggaagtggctggtttccgactctccggtcgccttgaaggactcggttcgcggggtttgctccattatcgctacgcgaccctgaaagggaaggatcacctgaaactgtggattatgcatcttcttctgcatgcaacggacggccccgatggaggcgacagagaaagtcttcttctgggaaaaaacggattatggcgatattccgccatcgatgaagcccggtgtcaccttgaaaaactgatctccctttatcgggaagggttgtgtcgccctcttcacttttttccggaaacctcctgggcctatgccgtaaaaatattaaggaacggagaactgtcggaagaagcggaagagtccgcctgggacgcggcaagaaaagcgtgggaaggagatgattttcagaggggcgaaggtgttgatcattacaaccgcctttgttttggggatttctccccccaggatgtggaatttcaggaattgtccctgaacgtctatagacctctgctcgaaacgcaatggaagaaaaaatcaaatcgtaaagcgccatga

SEQ ID NO: 157249 - protein, 1113 aa, Syntrophus aciditrophicus SB
MKGLNIIASNRMEVLAEKLADVLAGPLSSPLTPEIIVVQSRGMERWVSMQLAAFHGICANVRFPFPRRMIQDIFHAVLPGWEAEQDFNPELAAWRIMSLLTVASSRPGFEPLAAYLHDDSQGLKRFQLSRQIARLFDQYLIFRPEMILNWEKRISDGDEYSWQADLWRLFVEEGKIVHPAVLRLSLQDVMIRRGNQLSACLPERISIFGISYLPPFYLDIFLAVSSFMEVNFFLLNPSREFWFDIRSSREISREVKLVKGSVEKGMENEELSRSELYLEEGNSLLASLGTLGREFWSFLGECSGREEEYYVEPGETSLLHAIQSDILNLREGGGEADADGREVMFSEERSLQIHACHSPMREVEVLHDSLLDLLEADPSLQPHDIVVMTPEIETYAPFITAVFETVDEDAPGLVDQPKIPYHIVDRATISGRPVLGGLLKILDLPLGRFAAGEVLSLLEVAAIRNRFGLTEADIDQVSRWVADSGIRWGIDERSRLREGLPEIATNSWQWGLKRMLLGYALPARNNELFSGIMPCETAEGSEARLLGILAEFTERLFLTAESLSQDRTLSDWGSLLDDISDRFFLGDEDSEPDIRNLRQLASDLKNLQEKTGFPEKISLAIVRSFLQDRFQATGADGGFLSRGVTFCSLLPMRSIPFRVICLMGMNNGDYPRRPQTPSFDLMARHPRRGDRSRRNDDRYLFLEALLSARDTLYISYVGQSMEDNSRIPPSVVVSELLDYVRRGFVLKDCNIDELLITYHPLQAFSPVCFTEESCRLFSYSEENRKAANTLLKRSSLTSIPGAEAERLPEDPAMATQATIRDLIAFFRHPARFFLQRRLAVFLGEADIVLEENEHFDVEGLDRYGIEQLLMEKEIETGHMEEVYPVLAAQGLLPHGAVGQSRFDALKRDICHFVRSYKHILHSENIPPRDIDLEVAGFRLSGRLEGLGSRGLLHYRYATLKGKDHLKLWIMHLLLHATDGPDGGDRESLLLGKNGLWRYSAIDEARCHLEKLISLYREGLCRPLHFFPETSWAYAVKILRNGELSEEAEESAWDAARKAWEGDDFQRGEGVDHYNRLCFGDFSPQDVEFQELSLNVYRPLLETQWKKKSNRKAP

SEQ ID NO: 157250 - DNA, 3402 bp, Burkholderia xenovorans LB400
  CDS (1)..(3402): transl_table=11
atgcaaaccccgggatccatgctccagctcttctactcgaaccgctacgaaacgcttgtcggcgcgctgctcgacgacctggcgcaagcgccgtccgacccctggaccgcgcagcccgtgatcgttccgagcgctgccgtgcggcgccgtctcgagctcgatatcgccacgcgccagggcatctgcgcgaatgtcaactttggttatctcgcgcaatggctgtgggcgcagatcggcggcgtgatcgaggtaccgaagcattcgccgttcgcgcccgaccggctcgtatggcgctgctaccggttgctgggcccggggaacgacggggacgaagcgctgccctggaatgcgtcgccgcgtctgcgcacgtatctcgatgcggcagacgcctcgatgcgctacgaactcgcgcggcgcgtggcgaccgtgctcgaccactatctgacgtatcggccggaatggctgctgcaatggcagaagggcggctcgatcttcgcgagcggtgcggcggacgactccggcccgcgtctcgtcggcgcgagcgaagcggcgcgcgaagacgagcgctggcaagccgcattgtggcgcgtggtgctcgcggaagtggcgggaaacgggcaaacggccgcagccgcgttgccgcccgcttaccgttttctggatgaaatcggcacgctcgatctcgaagccatctcgaacgcacagtggcccgaggcggtcagcgttttcgcgctgcccaccatgccgccgttgcacgtggcgctgctgcgcgcgctttcgcgctgggtcgacgtgcgtctgtacgtaatgaacccgtgccgcgagttctggttcgacgtggtcagcgaagggcgcgttcaggcgctcgacgccaccggccagctcgactatcaggaagtcggccatccgctgcttgccgagtggggccggcagacccaggcgcagttgcatatgctgcacgagctgaccgagagcgcggcctccggcgagaccggcgatttcacggaaaatccgcaaccgagctggcttgccgccgtgcagaacggcatcctcgatctgcgcaaggagaccgacaccgacgaactaccgagcgagcaaggcattgaggtccacgtctgccacagtctgtcgcggcagctcgaagtgctgcacgatcgcctgctgggctggttcgacgaattcgacgatctgcaaccgtccgacgtgctggtcgccgtatccgatctcgcggcggccggccccctgatcgacgccgtgttcggcaccacgccgcccggcgacacgcgccgcattccgtatcggatcaccggcttgccgccgtcgcaggccaatccggtcgcgcggttgctgctcgattggctggccttgcccgagcgcagcgtgggcgcgccggacctgatcgaatggttgcgcgtcgacgccattgccgtgcgttacgggatcgacgcgagttcgctcgaagccgcacaggaatggctggccgcggccggcgcgcgtcgcgggctcgcaccggtggagccgactggcgaacatgtgccgatcgcgcgtcatacgttggcggatgcgcttacgcgtctgtatctcggctacgccatgccggacggcggcgaaccggtcgacgcgtggctgccggtcgaaggcgccgacggcgcggatgccgaactgctcggccgcctgtcgcgtttcgtggacgacatcgacagcttcgcggcgaattgcgcggtcgaacgcacgcctgccgaatggacccaactgctgctcgacacgctcgcgcagtgtttcgacggtggcgtcgaattcgccgattcgctcgccgccgtgcgcgacgcgatcgacaaaatgggcgacgcaatgcaagccggcgcgcaagagatcgcgatgcccgccgcggtggtgcgcggtgcgctgaccgaagcgctcgacgacccggcgcgcggcggcgtgccctggggcagcgtgacgttttcgtcgttgaccagtttgcgcggcttgccgtatcgcgtggtgtgcctgctcggcatggacgacggtgtgctgccgagcctcgcgcgcgccgacgagttcgatctgatggccgcgttcggcaaagccggcgaccgccagcggcgcgacgacgaacgcaatctgttcctcgatctgctgctcgccgcgcgcgatcgcctcttcattgcttatacgggccgcagcattcgcgacaacgcgccgttgccgccggccgcgctggtcgatgaactgctcgaccatcttgcgcaggtgtcggcgggcgagggcgcgagtccggccgaagtcgagagcgcgcggcatgcgttcattgtcgatcatccgttgcaggcgttcgcatcggactatttctcgccgcaatccggtctcttcagctacgacgcggatcgcgccgaactggccacgctactggccgcgcccgcccatcccgctgccgcgcctttcttcgatcgacccttgccgcctgaagagccggcgccgatcgccttcgacgaattcgtgcgcttctggcgtcatcccgcgcgggcgttgttgcgcgaccggctgggcatcgtgttgtcggacgcacagggcgaattgctcgacaccgagccgttcgaactggattacgccgggcgcgatgcattggcggatcgtcttctgccagtcctgctcggcgccgatacggacgacaacgtcatcttcgaacgcgtacgccgcgtggcggcggccagcccggaattgccgggcggcgcgaccggcgcggtgtggcgcgcgcgtgagctcggcgcgttgcgccagctcgccgacagcgtgcgccgcgaagtggcttcgggtgtcgagcgtttgccgttcgtgctcgacatcgcaccgcgctggcccgagaacacggagattgccggcccgcttttcggcccgcatgacgcgctgctgcggcaagccgcacaaacgccgctgcaactgcacggcagtctgaatctgcttaccgaaacaggacaagtgattttccgctacgccaaacctaccgcacgcgactatctgtcggcgtggctcgcgcatctggtgtattgcgccgcacggccggacggtccgcgccgcaccgtatggcatggcagcggcgagagcttcgagctcacgccggtcgccgcgccgctcgacgaactggcgccgcttgccgcgttgttcaaggcagggcgcatgctgccgttgcgctttttcccgaagagcgcgtggacccgggtcagcgaaagcgaatccgcggcgctgggcgtctggatcaacgaccgcgtgcgcggcgagtccgacgaccccgcgttgcgcatcgccttgcgcggcacgccgctcacgctcgaagaaccgttcggcagtctcgccgcgatcgtgttcaagccgctcatccagcatctgcggagcgcgtcatga

SEQ ID NO: 157251 - protein, 1133 aa, Burkholderia xenovorans LB400
MQTPGSMLQLFYSNRYETLVGALLDDLAQAPSDPWTAQPVIVPSAAVRRRLELDIATRQGICANVNFGYLAQWLWAQIGGVIEVPKHSPFAPDRLVWRCYRLLGPGNDGDEALPWNASPRLRTYLDAADASMRYELARRVATVLDHYLTYRPEWLLQWQKGGSIFASGAADDSGPRLVGASEAAREDERWQAALWRVVLAEVAGNGQTAAAALPPAYRFLDEIGTLDLEAISNAQWPEAVSVFALPTMPPLHVALLRALSRWVDVRLYVMNPCREFWFDVVSEGRVQALDATGQLDYQEVGHPLLAEWGRQTQAQLHMLHELTESAASGETGDFTENPQPSWLAAVQNGILDLRKETDTDELPSEQGIEVHVCHSLSRQLEVLHDRLLGWFDEFDDLQPSDVLVAVSDLAAAGPLIDAVFGTTPPGDTRRIPYRITGLPPSQANPVARLLLDWLALPERSVGAPDLIEWLRVDAIAVRYGIDASSLEAAQEWLAAAGARRGLAPVEPTGEHVPIARHTLADALTRLYLGYAMPDGGEPVDAWLPVEGADGADAELLGRLSRFVDDIDSFAANCAVERTPAEWTQLLLDTLAQCFDGGVEFADSLAAVRDAIDKMGDAMQAGAQEIAMPAAVVRGALTEALDDPARGGVPWGSVTFSSLTSLRGLPYRVVCLLGMDDGVLPSLARADEFDLMAAFGKAGDRQRRDDERNLFLDLLLAARDRLFIAYTGRSIRDNAPLPPAALVDELLDHLAQVSAGEGASPAEVESARHAFIVDHPLQAFASDYFSPQSGLFSYDADRAELATLLAAPAHPAAAPFFDRPLPPEEPAPIAFDEFVRFWRHPARALLRDRLGIVLSDAQGELLDTEPFELDYAGRDALADRLLPVLLGADTDDNVIFERVRRVAAASPELPGGATGAVWRARELGALRQLADSVRREVASGVERLPFVLDIAPRWPENTEIAGPLFGPHDALLRQAAQTPLQLHGSLNLLTETGQVIFRYAKPTARDYLSAWLAHLVYCAARPDGPRRTVWHGSGESFELTPVAAPLDELAPLAALFKAGRMLPLRFFPKSAWTRVSESESAALGVWINDRVRGESDDPALRIALRGTPLTLEEPFGSLAAIVFKPLIQHLRSAS

SEQ ID NO: 157252 - DNA, 3249 bp, Mycobacterium sp. MCS
  CDS (1)..(3249): transl_table=11
atgccattccatctgcaccgggcggagcgcaccgacctcctggccgacggactcggtgccctgctgtccactcccctggccgacccgttcgccgaggaactcgtgctcgtcccggcgaagggcgtcgagcggtggctgagccagcggctctcgcacgtcctcggccgcggttccggcgacgacggggtctgcgcgggcatcacattccgcaatccgcggtccctcatcgccgacattaccggtacccgggacgacgacccctgggcccccgactcgctggtctggccgctgctcgaggtcatcgacgacaacctcgaccaaccgtggtgcaccacgctcgccacccacctcggccacttcgaacacggccaggagcaggaactccgccagagccgccgctacgccgtcgcccgccgcctcgccggcctgttcgcctcctacgcccgccagcgccccggactgctcgtcgactggctcgccggcaaccccgcagacctcgacgacgacctgcactggcagccgcatctctggcgacacctcgtcgagcgggtgcccgccgacccgccgcacatccggcacgccaaaaccgttgcccgcctgcatgaatcacccagcaacctgcccgaacgcatgtcgctgttcggccacacccggctgccctccaccgaggtcgaactgctcgacgcgctcgccacccaccacgatctgcacctgtggctgccgcaccccagcgacgacctgtggaccaccctcgaaccccaccgcggcgccgtgcgccgccgcgaggacaacacccaccgcgaggtcggccacccgctgctcgccaccctcggccgcgacctgcgcgaactgcagcgcagcctgcccgacgattcgcagaccgacgagtatctgggcaccgccgaccatcccgacaccctgctcggctggttgcagtccgacatcgccgccaacgcggtccgccccgacggccgccgactgcacgaccacgaccgctcggtccaggtgcacagctgtcacggcgccgcccgccagatcgacgtcctgcgcgaggtgctgctcggcctgctcgtcgacgacccgacgctcgaaccccgcgacatcctcgtcatgtgcccggacatcgagcactacgcagcgctgatcgtcgccggcttcggcctcggcgacgtgatccacggtgcgcacccagcgcatcggttgcgcgtcaaactcgccgaccgcgcactcacccagaccaacccgttgctcggcgtcgccggtcaactcctcgcgctcgcgggcggccgcgccaccgccaccgaggtgctcaacctcgccgaggccccgtcgatccgggcgcggttcaccttcagcgacgacgacctcgacgcgatcggtgactgggtacgcgaggccaacatccggtggggtttcgaccgcgagcaccgccacccctacggcgttgacttcgtccagaacacctggcgtttcggactcgaccgggtgctcgccggcgtcgcgatgtccgacgactcgcacgcctggctcgacaccacgctgcccctcgacgatgtcggcagcgaccgcgtcgaactcgccggccgcctcgcggaatacgtcgaccgactgcagcattgcgtcgaaaacctcagcggcacaaagccactccacgaatggctcgaagcgctgcgcaccggtatcgaccagctgaccgcggtccccgacgacgacacctggcagaccagccagctggagcgcgagttcgccgacgtcctcacccaggccggctcccgcaaggacaccctgctgcgcctacccgacgtcaaggccctgctcgaccgccacctcgccggacggcccacccgggccaacttccgcaccggcacgctcaccgtgtgcacgatggtgccgatgcgctcggtcccgcaccgggtggtgtgcctggtgggtctcgacgacggggcgttcccgcgcctgggcgtggtcgacggcgacgacgcactggcccgcgacccgatgaccggtgaacgcgacatccgctcggaggaccgccaactgctgctcgacgcgatcggcgcggcgacggagaggctggtcgtcacctacaccggcgccaacgagtactccgggcagcgcaaacctccggcggtgccgctggtcgaactgctcgacgcgctcgacgtcaccaccgaggccccggtgcgcaagcagatcctcgtcgaacatccgttgcagcccttcgacgttcgcaacgtcactccgggcgcgctaggggtgcccggcacaccgttcacgttcgactcgacggcgctgaccgccgcgaccgtcgcgtccggggaccgcgccgagcggccgggtctgctcacccatccgctgcctgcgccaccggaggacgacgtcgcgctcgacgatctgatcggcttcttcaaggatccggtcaaggggttcttccgggcgctggacttcacgctgccgtgggacgtcgacgccgtccaggacgccatgccggtggagatcgacgcgctggccgaatggcaggtcggcgaacggatgctcgacgacatgctgcgcggcctcaatcccgaacaggcgcaacaggcggagtggcggcgcgggtcgctgccacccggccggctcggctggcgcaaggcgcaggagttgcgcgatcaggccgccgcgctggccaccgcggcgcaccggcaccgacggcaaccggcccgggcgtatgacgtcgacatccacctcggtggcggccggcgcgtcaccggcacggtcccgaaggtgtacggcgaccgcacggtcaccgtcacgtactccaaactcgacggccgccacctgctggcgtcgtggatccagttggcggcgttgaccgctcaacttcccggtacggactgggcggcggtgtgtatcggccggccgaagcgtggcgccaccccgcgggaacggatgctcggcgcgcccggggatgccaccggtgtgctgcgcgatctggtgaacatgtacgacgcggggcgccgtgagccgataccgctgccgccgaagacgtcctatgcgtgggccgaggcgcgtcacagtcgtggagacgcggagcgcgagtcgcgataccgctggaagtcggaccgctacccgggtgaggacgccgaaccggccaacgtacgggtgtggggggcgcacgccccgctggacaccctgctcgcggcgggcatggacggctacgccggacgcctgtggctgccgatgctggaagccgagagggaccccgactga

SEQ ID NO: 157253 - protein, 1082 aa, Mycobacterium sp. MCS
MPFHLHRAERTDLLADGLGALLSTPLADPFAEELVLVPAKGVERWLSQRLSHVLGRGSGDDGVCAGITFRNPRSLIADITGTRDDDPWAPDSLVWPLLEVIDDNLDQPWCTTLATHLGHFEHGQEQELRQSRRYAVARRLAGLFASYARQRPGLLVDWLAGNPADLDDDLHWQPHLWRHLVERVPADPPHIRHAKTVARLHESPSNLPERMSLFGHTRLPSTEVELLDALATHHDLHLWLPHPSDDLWTTLEPHRGAVRRREDNTHREVGHPLLATLGRDLRELQRSLPDDSQTDEYLGTADHPDTLLGWLQSDIAANAVRPDGRRLHDHDRSVQVHSCHGAARQIDVLREVLLGLLVDDPTLEPRDILVMCPDIEHYAALIVAGFGLGDVIHGAHPAHRLRVKLADRALTQTNPLLGVAGQLLALAGGRATATEVLNLAEAPSIRARFTFSDDDLDAIGDWVREANIRWGFDREHRHPYGVDFVQNTWRFGLDRVLAGVAMSDDSHAWLDTTLPLDDVGSDRVELAGRLAEYVDRLQHCVENLSGTKPLHEWLEALRTGIDQLTAVPDDDTWQTSQLEREFADVLTQAGSRKDTLLRLPDVKALLDRHLAGRPTRANFRTGTLTVCTMVPMRSVPHRVVCLVGLDDGAFPRLGVVDGDDALARDPMTGERDIRSEDRQLLLDAIGAATERLVVTYTGANEYSGQRKPPAVPLVELLDALDVTTEAPVRKQILVEHPLQPFDVRNVTPGALGVPGTPFTFDSTALTAATVASGDRAERPGLLTHPLPAPPEDDVALDDLIGFFKDPVKGFFRALDFTLPWDVDAVQDAMPVEIDALAEWQVGERMLDDMLRGLNPEQAQQAEWRRGSLPPGRLGWRKAQELRDQAAALATAAHRHRRQPARAYDVDIHLGGGRRVTGTVPKVYGDRTVTVTYSKLDGRHLLASWIQLAALTAQLPGTDWAAVCIGRPKRGATPRERMLGAPGDATGVLRDLVNMYDAGRREPIPLPPKTSYAWAEARHSRGDAERESRYRWKSDRYPGEDAEPANVRVWGAHAPLDTLLAAGMDGYAGRLWLPMLEAERDPD

SEQ ID NO: 157254 - DNA, 3261 bp, Rhodococcus sp. RHA1
  CDS (1)..(3261): transl_table=11
atgctcgtactgcatcgcgccgagcgttccaccactctcgcgtcggctctcggcgacgtgctcgcgaccccgctgtccgatccgttcgcccgggaggtcgtggctgtcccggcgaagggggtggagcgctggctcacacagcggctctcgaccgcgctcggtgcccggcccggcgtcggcgacggggtggccgcgaacatcgacttcccgtcaccgacccggctcgtcgacgagtgcctcgccgccgccaccggggtgtccgccgacgacgatccgtggaatccgtcccgggtgctgtgggcgttgctcggcgtcgtcgacgactgcctcagtgagccctggtgcgccgtcctcgcgaaacacctcgggcacggtctcccggaccgcgacccggacgatcaccggccgggccggcgctacgccaccgcgtcacacctcaccgatctgttccgcagctacgccgcgcagcggccggcgatgctggtcgactgggccggtggtcgcgacaccgacggtgcgggcggtccactcgacgacgaccttctctggcaggccgaactgtggcggcggctgcgcgagaagatcggcagccccgctcccgccgagcggctcgactccgcctgcgcccggctgcgcgcggaaccggatctcgtcgaactccccgcccgattatcactgttcggtccgacgcggctcgcgaccgatcagatcgccgtcctcgccgccctcgccgtcaatcgtgatgtgcacctgtggcttccgcatccgagtcccaccatgtggtcgtcgttgtcgacggcggacagcgtgctcgcacgtgccgacgaccccaccgcgctgtccgtcgcccacccgctgctgtcgagcctggcgcgggacgtccgcgaactcgagtcgaggctgacccgcctcgacgtcgacgacctccaccacgaggggcctgcgccccgcgactccctgctggggtgcctccaggcggatgtccgggacgaccgggcgcccgcgctcgccgaatgcacggccgacacctccgtccaggtccacgcctgtcacggaccggcccgccaggtggaggtcctgcgcgaatgcctcctacatctcttcgaggacgatccgactctcgaaccgcgtgacgtgctcgtcatgtgccccgacgtcgagtcgtacgccccgctgatccgggcggcgttcgggcaggacgtgctcgggcatcccggccatcgtctgcgggttcggctcgcggaccgtgccctgcaccagaccaatccggttctcgccgtggtgtcgactctcctcgaactcgccgacgcgagggtgacggcgagccaggtcctcgacctgtcggcggccgcgccggtgcgcaggcggttccggttcggcgacgacgacctcgaacggatccgggagtgggcgaccgcgacaggagcccgctggggaatcggtccgcggcagcgcgcggcgttcggtctcggcgacttcccgcagaacacgttcaccaccgcgctcgaccgcatcctgctcggtgccgccgccgacgagtccgacggcgaatggctcgccctggcgctgccgctcgacgacgtcgacagcaacgacatcgacctcaccggtcggctcgccgaattcgtcgaccggctcgacgtcgcgctgcgcgggctcggcgggccgcagtcggtcgcggactggtcgagcgcgctcacccgggcactcgatctgctcgtcgacgtcagcgccgccgacacgtggcaactcgcgcaggcgcgacgagaactcgggtcggcgatggagcacggcggcgacgcggtcctgcgactgtcggacgtgcgcgcgatgctggccacccggctcgcgggccgccccacccgcgcgaacttccgcaccggcgagctgacggtgtgcaccatggtgccgatgcggtcggtgccgcaccgcgtggtcgttctcctcggcctcgacgacgaagtgttcccgcgcggggtgagcgtggacggcgacgacgtgctggcccgtaatccgcttctcggcgaacgcgacccgcgcagcgaggaccggcagttgctgctcgacgccgtgatgtcggcgagtgagaaactcctgctgttctatacgggcgccgaccccgtcaccggcatgtcccggccgccggcgatcccgctgtccgaattgctcgacgcggtggcggccaccgtcgggagcgacgccctgcccggtatcgtgacccggcatccgttgcagccgttcgatgcacgcaacttccggcccgagcacccgttcagtttcgatcgggcggcgctggccggtgcccgtgccgcgcagcacccgcctgaaccggagcccgcattcctgccggcaccgttggtgccgccgcccctcggggacgtcgatctcgcggacctcatcgcgttcctggtgcacccgacgcaggcgtttctgcggcaacggctggggctgcgggtccctgacgtggacgaggacctcgccgacgcactggaggtgtcgcccgatccgctggcccggtgggatctcggccagaggatgctcgtcgcgaggctgacgggagtcgaactggccgacttccgcgccgcggagtggcgccgcgggacgttgccgccgttcaagttgggggagtcggtgctcggtggaatcgagcacgcggtcgagtcgctcgtcgccgtcagcgggtccgtgcatgtcgggcgggcggaaaccgtggacgtcgatgtcgatctcggttccggacggcgcctcaccggcaccgtcggcggggtgcacgggtcggtgatcgcgaccaccacgtattcgaagttggggccgaaacaccgcctcgccgcctgggcgcaattgctggcggtcgcggcgtccgacaacgagaccgaatggactgccgtgacgaccggccgcggcgcgtacagccgtccggcgtggcgctcgacccttaccgcacccgagaacgcactggaggagttggtgcgactcgtcgaactgcgcgatctggggctgcacgcgccgttgccgatcgccacgggcgcgtcggcggcgtatgccgaacgacgccacggcggcagcagcatggaggacgcgatcgaggcggcccggaaggaatggagcagtgacttcggtgactcacgcgaccggcacatcacgtacgtgtacgggtcctcaccgggcatcgacgtcctcggcgacgcggtgaccatcgagaactacgcccggcaactgtgggcgccgctgctcgccgccgagacgttggcgcagccgtga

SEQ ID NO: 157255 - protein, 1086 aa, Rhodococcus sp. RHA1
MLVLHRAERSTTLASALGDVLATPLSDPFAREVVAVPAKGVERWLTQRLSTALGARPGVGDGVAANIDFPSPTRLVDECLAAATGVSADDDPWNPSRVLWALLGVVDDCLSEPWCAVLAKHLGHGLPDRDPDDHRPGRRYATASHLTDLFRSYAAQRPAMLVDWAGGRDTDGAGGPLDDDLLWQAELWRRLREKIGSPAPAERLDSACARLRAEPDLVELPARLSLFGPTRLATDQIAVLAALAVNRDVHLWLPHPSPTMWSSLSTADSVLARADDPTALSVAHPLLSSLARDVRELESRLTRLDVDDLHHEGPAPRDSLLGCLQADVRDDRAPALAECTADTSVQVHACHGPARQVEVLRECLLHLFEDDPTLEPRDVLVMCPDVESYAPLIRAAFGQDVLGHPGHRLRVRLADRALHQTNPVLAVVSTLLELADARVTASQVLDLSAAAPVRRRFRFGDDDLERIREWATATGARWGIGPRQRAAFGLGDFPQNTFTTALDRILLGAAADESDGEWLALALPLDDVDSNDIDLTGRLAEFVDRLDVALRGLGGPQSVADWSSALTRALDLLVDVSAADTWQLAQARRELGSAMEHGGDAVLRLSDVRAMLATRLAGRPTRANFRTGELTVCTMVPMRSVPHRVVVLLGLDDEVFPRGVSVDGDDVLARNPLLGERDPRSEDRQLLLDAVMSASEKLLLFYTGADPVTGMSRPPAIPLSELLDAVAATVGSDALPGIVTRHPLQPFDARNFRPEHPFSFDRAALAGARAAQHPPEPEPAFLPAPLVPPPLGDVDLADLIAFLVHPTQAFLRQRLGLRVPDVDEDLADALEVSPDPLARWDLGQRMLVARLTGVELADFRAAEWRRGTLPPFKLGESVLGGIEHAVESLVAVSGSVHVGRAETVDVDVDLGSGRRLTGTVGGVHGSVIATTTYSKLGPKHRLAAWAQLLAVAASDNETEWTAVTTGRGAYSRPAWRSTLTAPENALEELVRLVELRDLGLHAPLPIATGASAAYAERRHGGSSMEDAIEAARKEWSSDFGDSRDRHITYVYGSSPGIDVLGDAVTIENYARQLWAPLLAAETLAQP

SEQ ID NO: 157256 - DNA, 3435 bp, Haemophilus somnus 129PT
  CDS (1)..(3435): transl_table=11
atgtttactttgtattattccaatcaattggaaacgcaaaaagatattttgttacatttaatggatcaacagccattatcagatcctttccaaaaagaagttattttagtacaaagtggcggtatggcacagtggatacagtggcagattgcagagaaaaaaggtatatcggcaaatttgtcttttcctatgcctgcaagttttatttggcaattatatgttgataatttaccgcaagtcacagcttcttctcaatttagtaaagaaaatatgacttggcgattaatggaaattattccgcattatatagatcaaccggaattttacatattgcgtcaatatttacagcaaagttaccaatcaagtcagcagcgatactaccaattagccagcaaaatagcagagttatttgaccaatatttagtttatcgaccggaatggattataagttgggagcagaataaaggcgtagaaattattcagcaaattcagtattaccaaaaaaatttatttgtctcagaatcatgtttttctcaagttgagcaacatattgtttggcaaggtattttatggagagctttagtatgctctgtgccaaaagaaacacaaaagaatgttttacatcgtgcacatttacatttacttttcttaaaacatattgccggcgaaaaacctaaaaatttgcctacgagaatttttgtatttggtatttcagctttaccgaaggtgcatttagatactttaagtgcattaagccagcattgcgatgtgcatttattttttaataatgcttgtcgtgaatattggggagatataattgatcagagccattggcaacgtttgaaagtgcgagagcgtataagttggcaagatttccaacaaccacaaaatacacaggcttggttatccgatgagcaaatacatacttttgaacaaaatgtatttgaacaaatttatgatgaaaagttacaggttggcaatcctttgctttcctcatggggaaaattaggacgggattatttgtatttactcactgaactggaggctaatgaaatcaatgcttatgtcgaactttcggaaaaaacgttgttgtcgcaagtacaggcactcattttagatttggttccttcgaagcacaagtttttaaatttggcagaaaatgaccgctctttaacttttcattcttgttatagtccaatacgagaggttcaagctctacaagattatttgttacatctatttaaccaagctcaggatttgacacctaaagatgtggtagttatggttgcagacattgataaatatgcaccatatattcaggcggtattcagtcaaggcgaacactatattccgtactctatcgcagacagcaaactttccgaaaatgaccctttagtatctgcttttttacaattgttaaatttaaaagaaagtttattcagtgcggaggaagtgctgacttttttggatcatcctgttattcgtcagagttttaatattactttagaggatttggcacaaattcgtcattgggttgagcattcgggtattcgattcggattagaaaaatatccgcaacaatccttgcaaaattataacgcttggcaggcaggtttggagagaatgttactgggatttgctatgcgggaagaacatggtctatggttagatacgcttggctttgatgatacctatggattaaaagggcagcttgtcggttatttaaaggattttattactcgtttgtatcaatggcatcaatttttgcaagcagatcacgttattgaaaagtgggaagaacatttaattgaattagtgtcatctttttttgtggtagacggaatggatattccgcagcaatacaaaacaacttttaattatcttattgacactattcaacaattaacggagttgatcctagatagctcttttcagcaagaaataagtgcggaggttatttacgaagtttttgttgaacgcttaaaagatatacctaatagcctaaaatttttaatggggaaagtcactttttgtacgcttctccccatgcgatcaatcccttttaaagtggtgtgtttacttggtatgaatgatggtgattatccacgtcaacaaacgccgaacagctttgatttaatgcaatatcatcgtaaaaaaggcgatcgttttcgccgagatgatgatcgctatttatttttagaagcattgatctcggcacaacagtatttttatgtgagttatattggtcgctctattattgatgatagtgaacgagaaccttcagttcttgttacgcaattgttggattatatagctgaaaatatcaatgctcaaggtgatctaaaagggcaagatattctgaaaaaatcacttattcaacaacatgcgatgactgcatttagccgagaaaatttcaccaaaagagaccgctctttttttaagcaatggctagtgttggcaaataaaaaagatagtggcaatttggcgaattttttacagccgataaatgatacagagatagttaaagaaatttcattaaatgatttaattgcgtttattcaggatcctgttcggtatttttttgagcaaaaattacgtgtttttttacgtaagacagaacaaaatattgcggatactgaaaattttactttagataatttagagttatatcaaataaaagaagaacttatttatctttctgagcaggaatgggaagacttttttgctaggatgaaaattaagggaattatgccgcaaggggcgtttgcaaaaatttatcagcaaaaaacaaaaaatgagatcattacacttaaatctttagttacgccttatttggatcaaatatcggaacaaattcctgttgacttgagcgttgaaacagaatatggaaaagtgtgcttaacggggagcattgacagtttatatcatcaaaaaatgcgaagagtaacgtggagagcctctgctgtcaaaacgaaagatattatccaaacatggatttattatttattacaaaccttggttggagagcctaattcgcaagttgagcattacgctttagacagcagactttcttttgaaaaaatagaaaaatctaccgcacttcaacagcttcaaacttatgttgaggcatatttacttggacaagtttcagtgttattaatgccaatgaaaaatttcgatcaatatcttcaattgctttttactccgaagagtaataaatggaaagaggaaaaggatattgatttatctgcttgttttgaattgttatcagaacttggctcaggtagaaaagagagaaatttttatgtgaaaacagatctttattggcaaagaatattagcacaaacaaaactagacgattcacatattttagaaattaatcaacgtgttatacaatggttcgatttaatgttaatgctaaaaagagttgaatag

SEQ ID NO: 157257 - protein, 1144 aa, Haemophilus somnus 129PT
MFTLYYSNQLETQKDILLHLMDQQPLSDPFQKEVILVQSGGMAQWIQWQIAEKKGISANLSFPMPASFIWQLYVDNLPQVTASSQFSKENMTWRLMEIIPHYIDQPEFYILRQYLQQSYQSSQQRYYQLASKIAELFDQYLVYRPEWIISWEQNKGVEIIQQIQYYQKNLFVSESCFSQVEQHIVWQGILWRALVCSVPKETQKNVLHRAHLHLLFLKHIAGEKPKNLPTRIFVFGISALPKVHLDTLSALSQHCDVHLFFNNACREYWGDIIDQSHWQRLKVRERISWQDFQQPQNTQAWLSDEQIHTFEQNVFEQIYDEKLQVGNPLLSSWGKLGRDYLYLLTELEANEINAYVELSEKTLLSQVQALILDLVPSKHKFLNLAENDRSLTFHSCYSPIREVQALQDYLLHLFNQAQDLTPKDVVVMVADIDKYAPYIQAVFSQGEHYIPYSIADSKLSENDPLVSAFLQLLNLKESLFSAEEVLTFLDHPVIRQSFNITLEDLAQIRHWVEHSGIRFGLEKYPQQSLQNYNAWQAGLERMLLGFAMREEHGLWLDTLGFDDTYGLKGQLVGYLKDFITRLYQWHQFLQADHVIEKWEEHLIELVSSFFVVDGMDIPQQYKTTFNYLIDTIQQLTELILDSSFQQEISAEVIYEVFVERLKDIPNSLKFLMGKVTFCTLLPMRSIPFKVVCLLGMNDGDYPRQQTPNSFDLMQYHRKKGDRFRRDDDRYLFLEALISAQQYFYVSYIGRSIIDDSEREPSVLVTQLLDYIAENINAQGDLKGQDILKKSLIQQHAMTAFSRENFTKRDRSFFKQWLVLANKKDSGNLANFLQPINDTEIVKEISLNDLIAFIQDPVRYFFEQKLRVFLRKTEQNIADTENFTLDNLELYQIKEELIYLSEQEWEDFFARMKIKGIMPQGAFAKIYQQKTKNEIITLKSLVTPYLDQISEQIPVDLSVETEYGKVCLTGSIDSLYHQKMRRVTWRASAVKTKDIIQTWIYYLLQTLVGEPNSQVEHYALDSRLSFEKIEKSTALQQLQTYVEAYLLGQVSVLLMPMKNFDQYLQLLFTPKSNKWKEEKDIDLSACFELLSELGSGRKERNFYVKTDLYWQRILAQTKLDDSHILEINQRVIQWFDLMLMLKRVE

SEQ ID NO: 157258 - DNA, 3711 bp, Shewanella sp. MR-4
  CDS (1)..(3711): transl_table=11
atgctgaagttaatccaatccaatcaaatggaagtgctctgtgcccatcttgccgcgtatttacgccagccgctacccggcgcggggttattgcaaaatgagcatattttggtgcaaagccccgggatgtcgacttggttacgccttgaaattgcaaaacaaaatggtattgccgccgcgctggagttcccgctaccttccagctttatttggcaactgtgccacgatttactccccaatgtccccaaggaaaacgccttcactaaggcggcaatgacctggaagctgatgcaactactgccgcggctactggatgaaccttcctttgggccactgcgccattatttgggtcataccttagataatctggaatcgagcgcggctgacacccatagcaaccatcaacatggtgccgtaagcgccgatgatattaagctttaccaactttgcggccgcatcgccgatatcttcgaccaatatttggtttaccgccccgactggattgccgcgtgggaagccaatgaaccgcttgagtcactcaaattgaatgaggagcaaagctggcaacccatcctctggcgcgcgctgattgcctacaatcgcgatgagctgcgtcaaagccactaccacagggccaatctacatcaggatttgattgctgcattgggggatagcaccaattccctcgcaaaattgccgcagcgtttatttgtgtttgggatctcctctatggcgccccaaaccatcgatgtgctccaccagctcgcgagccgtatcgatgtgattatcttaagccttagcccctgtcagcattactggggcgacattatcgacccacgccatcgggcgcgtatggcattgcaatatgccggaaaacgccaattagccgagcaatgggaagataaactcgaagtcggcaatcccctactcgccaacaatggcaagatgggccgcgaattactcgatatgctgctcgaactgcccccagagcactgtgactttggcgacgatgtgtactgcgagccctgcggcgatcctaacgatccccacgctcgcgccagcatgctagccggggtgcaatacgatattttagaaatgcagacactcgatcgcgtactcgggccagatgctgagctatatcaagaagtcgcgaatcgccgggtattaacagccgacgatgattcaattcaaatcaagagttgccacagcccacttagggaagtcgaaaccctgcacgatcatttactcgacctgctggatagcgacaaccaactcacgcccaaagacatagtggtaatgatgcccgatgtcgccgcctacgccccctatatcgatgcggtgtttgcagccaaacagggactggaatatatcccctatgccattgccgaccgcggcgcggcgcaggaatcgccactcattaatagctttttgaatttactcaatattaatcagagccgtttcggactgacggatattttaagcattctcgaagtcccagccattttgcgacgttttcagctcgaagaagacgagctgccactcattcgccgctggttagatgaagcaggtgtgcgttggggccgggatgaacagagccgccttaaacagggcgtgcctgctttcgagcaaaactcctgggcctttggtataaaacgcttaatcttaggttacgccttaagggacgatgcgccgctatatcagtcatccccgccgggaatgcactatttaacggttgctggggtggagggccaatcggcacaggcccttggcaaactgttgaattttattgaagtcctcgatgagaccacccaagtattagccaaggcgcaagcgccctcactgcggttactcgaactcaccgagctgttaaatgccttttacgcccccgatgaggacgagcgtgagcagctgcaggaaattcgcgatgcgattgccgccttagagcaagagctgcttgccgccagcccagccgatattggcccgcaagccaacgacttagatttaagcatcgaagtgttggcgctctggtttaatcaacgcttaaccgagtcacgtgtcggccaacgatacctcgcgggcagcgtgaatttttgtaccttaatgccgatgcgctcgattcccttcaaggtggtttgtctgctggggatgaatgatggtgtctatcctagggtgcaacatcctgtgggctttgatctgatggcccattttggtgcgcgcaaaggcgatcgttcccgtagattagatgatagatacctgtttttagaggcgttactctcggcgcgggagcagctttacatcagttatattggccgtagcgaacgggataactcggagcgtattccatctatgctggtctccgagctaatagaatattgccagctatgctatttacctgaatcccttgcggcagaagcttctactgtcaataacgaagatgcccaacaggcattgcttgaggctattgtgagccatcagccgctgcaaccttttgatcctaaactgtatcaagcagcactgccgcaagcccccgcctcccatgggataaaacagagttatagccagcagtggtgtccgcccgatagcaatagccagttgcagcatggccgatttatcgaagcccatacccagatagtgctcgaagatgacactctaagtggcagtgatgcacaacaggatattgagccccttggcgaagcagagcatgtggatatctcggcctttattcgcttctttcgcaatcccgcgcagtatttctttaatcgtaccctaaaagtagatttaaacctgaatattcaagcggatgataacgatgagccctttagtcttaatgcgttagagcgttatttattacaggctcagctccttggcgatgcgcttgagcaagggcaaaacgagcctagtactgaactgttacaacgccttaaggccagtggcaatttgccaatgcagccctttgatgatctgctgctgcgccaatacagccatgatatcgcgccgctgattggcagaaccctgtttatgcgcggcgatgtcgctcctcggcatgccgatattcggctcagctttgagttaccccatcagaatgcagggacacagttaaaagccaagcgggtgatcctcgaaggtcgaatcgatgatatcagccctaaaggattggtcacttgccgacccggcagtgcccatgggcgggacattttagccttgtatttgcgtcatttatgtttgatggccgcaggagtggctcaacctagctacctgcaatcaagctatctgctggatatggggcattttcatgccctcgcgcccattacgccagcgcttgcccatgcacagctcgccaacttattacagcttttttatcagggccaaattcatcccctgtgttttatgccaagaacctcactcgcctatgccagcgctggggcggacgaagaggaagacccgcacccaagcaaagacccgcacaaagcccggctcgaagcggcgcaaagcgaatggctggacgagcaaggtgaacttggcgaaggcacagatccccattaccagcggctgtttcattttcccgacgactttaccgaggcacattttggcaagctcgccgatgacatctatcggccaatgcttagcctgtaccacaaggataccctcgcccaactcgaggaatttgccctgaatgaagccccaaccgccacgacagggggagcagactga

SEQ ID NO: 157259 - protein, 1236 aa, Shewanella sp. MR-4
MLKLIQSNQMEVLCAHLAAYLRQPLPGAGLLQNEHILVQSPGMSTWLRLEIAKQNGIAAALEFPLPSSFIWQLCHDLLPNVPKENAFTKAAMTWKLMQLLPRLLDEPSFGPLRHYLGHTLDNLESSAADTHSNHQHGAVSADDIKLYQLCGRIADIFDQYLVYRPDWIAAWEANEPLESLKLNEEQSWQPILWRALIAYNRDELRQSHYHRANLHQDLIAALGDSTNSLAKLPQRLFVFGISSMAPQTIDVLHQLASRIDVIILSLSPCQHYWGDIIDPRHRARMALQYAGKRQLAEQWEDKLEVGNPLLANNGKMGRELLDMLLELPPEHCDFGDDVYCEPCGDPNDPHARASMLAGVQYDILEMQTLDRVLGPDAELYQEVANRRVLTADDDSIQIKSCHSPLREVETLHDHLLDLLDSDNQLTPKDIVVMMPDVAAYAPYIDAVFAAKQGLEYIPYAIADRGAAQESPLINSFLNLLNINQSRFGLTDILSILEVPAILRRFQLEEDELPLIRRWLDEAGVRWGRDEQSRLKQGVPAFEQNSWAFGIKRLILGYALRDDAPLYQSSPPGMHYLTVAGVEGQSAQALGKLLNFIEVLDETTQVLAKAQAPSLRLLELTELLNAFYAPDEDEREQLQEIRDAIAALEQELLAASPADIGPQANDLDLSIEVLALWFNQRLTESRVGQRYLAGSVNFCTLMPMRSIPFKVVCLLGMNDGVYPRVQHPVGFDLMAHFGARKGDRSRRLDDRYLFLEALLSAREQLYISYIGRSERDNSERIPSMLVSELIEYCQLCYLPESLAAEASTVNNEDAQQALLEAIVSHQPLQPFDPKLYQAALPQAPASHGIKQSYSQQWCPPDSNSQLQHGRFIEAHTQIVLEDDTLSGSDAQQDIEPLGEAEHVDISAFIRFFRNPAQYFFNRTLKVDLNLNIQADDNDEPFSLNALERYLLQAQLLGDALEQGQNEPSTELLQRLKASGNLPMQPFDDLLLRQYSHDIAPLIGRTLFMRGDVAPRHADIRLSFELPHQNAGTQLKAKRVILEGRIDDISPKGLVTCRPGSAHGRDILALYLRHLCLMAAGVAQPSYLQSSYLLDMGHFHALAPITPALAHAQLANLLQLFYQGQIHPLCFMPRTSLAYASAGADEEEDPHPSKDPHKARLEAAQSEWLDEQGELGEGTDPHYQRLFHFPDDFTEAHFGKLADDIYRPMLSLYHKDTLAQLEEFALNEAPTATTGGAD

SEQ ID NO: 157260 - DNA, 3555 bp, Alkalilimnicola ehrlichei MLHE-1
  CDS (1)..(3555): transl_table=11
ttggcgaccccagcgctgcagcccggtttcatggtggtccacggcaaccgcctggaggacctccgcgctctgatcgtggagtggatgcaggcctatccaccggcaccgttggagaccgaaaccgtcttggtgcagagcaacggcatggcccagtggctcagccatgccctcgcggctcacccggagtcggaggagccgggttgcgggatcgccgccggtctgtccatgcagctcccggcccgtttcacctggaccgcctaccgcgaggtgctggggcacgaggcggtgcccccggagtctcccttcgacaagcggccgctcacctggcggctgatgcgcctgctgccggagctcatcgatgagcccgggttcgagccgctgcggggcttcctggcccgggacgatgaccggcgtaagcgccaccaactggccgagcgcctggccgacctgctggaccagtaccaggtctaccgggccgactggctggtggactgggcgcaggggcacgatcaatgcgccggcccgggccgggcgccgcgccccctggatgcgcgcgagcgatggcaaccccggctctggcgcgccctgctggcggacatggacgaggcggagcgggggttgagccgggccgccatccacgcccgctaccgggaggcggtgcgcgaactggaccggcggccggcgggactcccgcgccggctcatcgtcttcggcatctcttcattgccccaccaggtgcttgaggcgctggaggccctggccgacttcacccagatcctggtctgcgttcacaacccctgcgagcactactgggcggacatcgttgccgacaaggacctgctgcgcgcccgtcgccgccggcagtcgcccaagccgggcatgcccgaacggctggacgatagcgagctgcacaatcacgctcaaccgctgctggcggcctggggcaagcagggccgggactacatccgcctgctggacgaacatgatgatccggcgcactatcgccacctgattgaatccctctcctggcagcgcatcgacctcttccgaccccacgggggcgactgcctgctgcaccaactgcaggacgatatccgcgagctccgcccgctggccgagacccgggccgcctggccgccggtggccgccgatgacgcctcgatccagttccacatcgcccacagcccccagcgcgaggtggagatcctccacgaccggctgctggggcggttcaatgacgcctcacgccccaccctccggccgcgcgatgtcatcgtgatggtcccggacatcgaccgctacgccccccacattcaggcggtcttcggccagaccgagccgggcgacccgcgccatatcccctataccctctccgaccagggccgacgcggtcgcgacaccgttcttatcgccctggagcaactgctgcatctgccggagagccgctgcgcggtcagcgagctgctggacctgctggacgtacccgcccttcggcgccgctttggtctggaggagggagacctgcagcggctccaccgctgggccgaaggggccggagtgcgctggggcctggatgccgagcagcgggcgcacctggacctgcccgccgggcttacgctgcatacctggcgctttggcctgcgccggatgctgctcggctacgccgtcggcagcggcgaggcctggcacggggtggagccctacgacgaggtgggcggcctggacgccgccctgctgggaccgctggagcagttgctcgccactctggaggccgcctgggcgcggctgcgtgaagcgcatgccccggcggtctggggcgagcatctgcgttggctgctggcggcctgtttcgagcccggaaacgaggaggaggccctcaccctggagcgattgcaacagaccctggagcaatggacggcggattgcgaggcggccgccctggacgagccgctaccgctgaacgtggtgcgcgagcactggctggccggcatggacgagggcgggttgagccagcgcttcctcgccggagccgtcaacttctgcaccctgatgcccatgcgcgccattcccttccgcctgatctgcctgctgggaatgaacgacggtgactacccgcgcagccccacaccgctggactttgacctgatggcggacgactaccgcccgggcgaccgttcccggcgggaggatgaccgctatctgttcctggaggccctgctctcggcccgcgagcagctctatatcagttgggtggggcgcagtgtgcgcgataacgaaccccaaccgccctccgtgctggtgggccagctacgtgatcacctggccgccggttggcggttggcagggccggtggatgagccgtcgacgccggagacggcggcgctgctcgagcacctgaccctggcgcaccccctgcagcccttcagccccgtccactttccggtggccggcgggccgggtgcaaggcacttcacctatgcccgggagtggcgggcggtgcaggccgcggcggccggcgccgaggagggcgaggtgcggcccggcatcgaccggccggacaacgagccgctgccgcccccggatccggaccaggccggggtgttggccccggggaccctggcccggtttctccagcggccggtgcgggccttctttgaacgccggctgtcggtccacttcgacgaggacgaggcggccagcgaggacctggaacccttcaccgtggacggcctgacccgctggcagctgcgcgagcggctggtccaggctggactcacccgggccgagggaccggagcagtggcccgtgctgatggcctcggagaccgcccggctgcagcgcagcggggtgttgccggtgggggccgccggcaccctggagggtgagcggttggtcggcgaggccaccgggctgctgactcgctaccatgaacgcctccaggcctgccccgagacccttcctcccgccgtcctggccccgctgagccacgccacctggaccctggaggcccaggtggagggcctgcgaagcgacggccggtcacgccggcagttgggctataccgtcagccgtctcaaagacagcaagggcaaggcgtggtaccccagcaagctgctgccggcctgggttgatcacctgatcgcgaacgccgccgcgggcggcgtgaccaccgagtggattgggctcgacgcctcgttgaccctgccgcccatcgaccgggcgggggccatcgaccacctgcagcggatcctggccgcctgggacgagggccagcgccgaccgctgcctttggcctgccagaccgccttcgcctggttgcaggccgtggccgaggacaaatcggacccgctggagatcgccagctccgcctacgcgggtgacgaccaccagcccggtgaggtgggctacgatccctacctgcgccgcgcctacccgcatgccgagtggctgctggccgacccggccttcgcccactgggccgagcggctctacggcccgctgtggcaagcggtcaaggcacaggatgaggccgaaaaggcaggaggccgcgtatga

SEQ ID NO: 157261 - protein, 1184 aa, Alkalilimnicola ehrlichei MLHE-1
MATPALQPGFMVVHGNRLEDLRALIVEWMQAYPPAPLETETVLVQSNGMAQWLSHALAAHPESEEPGCGIAAGLSMQLPARFTWTAYREVLGHEAVPPESPFDKRPLTWRLMRLLPELIDEPGFEPLRGFLARDDDRRKRHQLAERLADLLDQYQVYRADWLVDWAQGHDQCAGPGRAPRPLDARERWQPRLWRALLADMDEAERGLSRAAIHARYREAVRELDRRPAGLPRRLIVFGISSLPHQVLEALEALADFTQILVCVHNPCEHYWADIVADKDLLRARRRRQSPKPGMPERLDDSELHNHAQPLLAAWGKQGRDYIRLLDEHDDPAHYRHLIESLSWQRIDLFRPHGGDCLLHQLQDDIRELRPLAETRAAWPPVAADDASIQFHIAHSPQREVEILHDRLLGRFNDASRPTLRPRDVIVMVPDIDRYAPHIQAVFGQTEPGDPRHIPYTLSDQGRRGRDTVLIALEQLLHLPESRCAVSELLDLLDVPALRRRFGLEEGDLQRLHRWAEGAGVRWGLDAEQRAHLDLPAGLTLHTWRFGLRRMLLGYAVGSGEAWHGVEPYDEVGGLDAALLGPLEQLLATLEAAWARLREAHAPAVWGEHLRWLLAACFEPGNEEEALTLERLQQTLEQWTADCEAAALDEPLPLNVVREHWLAGMDEGGLSQRFLAGAVNFCTLMPMRAIPFRLICLLGMNDGDYPRSPTPLDFDLMADDYRPGDRSRREDDRYLFLEALLSAREQLYISWVGRSVRDNEPQPPSVLVGQLRDHLAAGWRLAGPVDEPSTPETAALLEHLTLAHPLQPFSPVHFPVAGGPGARHFTYAREWRAVQAAAAGAEEGEVRPGIDRPDNEPLPPPDPDQAGVLAPGTLARFLQRPVRAFFERRLSVHFDEDEAASEDLEPFTVDGLTRWQLRERLVQAGLTRAEGPEQWPVLMASETARLQRSGVLPVGAAGTLEGERLVGEATGLLTRYHERLQACPETLPPAVLAPLSHATWTLEAQVEGLRSDGRSRRQLGYTVSRLKDSKGKAWYPSKLLPAWVDHLIANAAAGGVTTEWIGLDASLTLPPIDRAGAIDHLQRILAAWDEGQRRPLPLACQTAFAWLQAVAEDKSDPLEIASSAYAGDDHQPGEVGYDPYLRRAYPHAEWLLADPAFAHWAERLYGPLWQAVKAQDEAEKAGGRV

SEQ ID NO: 157262 - DNA, 3516 bp, Pseudomonas aeruginosa UCBPP-PA14
  CDS (1)..(3516): transl_table=11
atgccagaacccttgggaaccaccgccctcacgcccggattcatgatcgtccacggcaatcgcctggacgacctgcgcgacctcgccgtttcctggatgcgccgctatccgctggcgccgctggaaagcgagcgggtcctggtgcacagcaacggcatcgcccaatggttgaagctggcattggccgaagatccccgcgaggacggtggcggcggtggcggcatcgccgcggcgctggaggtgcagttgccggcgcagttcctctggcaggcctatcgcgcggtgctgggccgcgaaagcattcccgaggtttccgaactggacaaggcgccgctgacctggcgcctgatgcgtctgcttcccggattgctggagcgtcccgagttccgcaccctgcaacgtttcctcgccgacgatgccgacctgcgcaagcgtcatcaactggccgagcgcctggccgacctgttcgaccagtaccaggtctatcgcggcgactggctcgacgactggagccagggccgcgaccagttgcgcacggcgaacgggcaggcgcgcccgctcggtgccgacgagcgctggcaggccgaattgtggcgcgcgctgctcgccgacgtcggtgccgatagcctggcccgcagccgctccggcgtgcaccggcgcttcatcgaggcgctgcgcttcgccagcgcggcgccgcgcgcgttgccgcgacgagtagtggtgttcgggatttcctcgatgccggcgcagaccctcgaggcgctggccgccctggccaggttcagccaggtgctgctctgcgtgcacaacccctgtcgccaccactgggccgacatcgtcgccgacaaggacctgttgcgccacgagtaccgccgccagcagcgccgcgccggcgtccccgccgacctcgacgaggaccgccagcaccagcatgcccagccgttgctggcggcctggggcaagcagggccgcgactacatcaacctgctcgacagctacgacgacccggacagctatcggaacctgttcggcgaggtcaacggcgggcgcatcgacctgttcagcgaggaggccccgcacgggctgctcggccagttgcaggacgatatcctcgaactgcgcccgttggcggaaacccgcgagcactggccgccggtggcgccgcggagcgacgcctcgatccgcttccatgtggcccacagcgcgcagcgcgaagtggagatcctccacgaccagttgctcgcccgcttcaacgccgatccgagcctgaagccgcgcgacgtgatcgtcatggtccccgacatcaacgcctacgcgccgcacatcgaggcggtgttcggccaggtgccgcgcgacgaccagcgcttcattccctataccctggccgaccagggacagcgcggtcgcgagccgctgctgatcgccctggagcacctgctgaaactgcccgacagccgtttcgccgtgagcgagatcctcgacctgctggacgtcccggcattgcgccggcgtttcggcgtcgacgaggccgacctggcgaccctgcaccgctggatcgaaggcgccggcgtgcgctgggggctggatgccgcgcagcgcgagcgtctcggcctgccagcggggctggagggcaacagttggcgcttcggtctgcggcgcatgctgctcggctacgcggtcggcgaaggtgcggccctgcaaggcatccagccctacgatgaggtcggtggcctggacgccgccctcgcaggcccgctggctgtgctgctggagcgcctcgaggtggcctacgccgagctggccgaaccggccaccccggcgcagtggggcgagcgcctgcaggccctgctcacggtgttcttcgaggcccacgacgagcgcgacgaactgcttctcacccagcttctgcaattgctcgaacgctggcaggaacactgcgcctgtgcggccttcgccgagccgctgccgatcagcgtgatacgcgaggcctggctcggcggcctggaccagggcggcttgaaccagcgcttcctggctggcgcggtgagtttctgcacgctgatgccgatgcgcgcgatcccgttccggctggtctgcctgcttggcatgaacgatggcgactacccccgccagcagtcgccgctggatttcgacctgatgcgcaacgactaccgccccggcgaccgctcgcggcgcgaggacgaccgctacctgctgctcgaggcgctgctctcggcgcgcgagcaactctacgtgagctgggtggggcggagtatccgcgacaatggcgagcggccgccctcggtgctgatcggccagttgcgcgatcacctggcggccggctggcgcctggatccggacggcgacggcgaggcgctgctgcgtgccctgacccaggagcatccgctgcagccgttcagccgccggtattttcacgatgcgccggagcagggcgtcgatggcctgttcacctacgcccgcgagtggcgcgaggtccatcgcgaggacgagatcggcgctcccgacgccgaagcgcccctgccgccgctggaactggagggcgcgctggggctgcgagcgctggcggagttcctcgccaacccggtgaatgcgttcttccagcagcggctcaaggtgcgtttcgacgacgagcaattgaccggcaacgacgaagagcctttcgaactggacgcgctggacaactggaagctgcaattcgagctgaccgaacgcatgaagcgctgggtcgagcgggactgggatgccgagggcctgccggcgcagttgcaggcccaggtcgagcgactgcggcgacagggtcgcctgccgctggcggcgttcggcgagttctccgcgcgccatttgctgcaaccgctgcccgacctgctctggcgctaccgccaggaaatcgagcgctggccggaggcggtcgagcagcagcaggagttgcgccatcgccattcgtccgggctggagctggaggactggctcggcggcttgcgtcgcgacgcttccgggcgcctggcgcgcctgcagttgctcagcggcaagctccatgaagggcgcggcttcaagtggcacagcctggtgcgccactggttgcagcacctcgccctgcaacgtctcggccagccggtgagcagcgtgctggtgagccagaccggcaccctggagattccgccgctgccgagcgagcgcgccggcgagtacctcgaccagttgatcgacgcctggcgccagggcatgcgccagccgttgccggtggcctgccggaccgctttcgcctggctcgccagtggtggcgccgcagagcccgagaaagccatgcgcgaggcgcgcaagcgctacgagggagggttcggcatggggggcgaggtggacgcctcgccggcgctggctcgggtctatccggacttcgaccggctgctcgccagcggtgagttcgcgcactgggccgagcagctctacgcgccgctgctggctgccctggggcgtggcgcggaggagcaggcatga

SEQ ID NO: 157263 - protein, 1171 aa, Pseudomonas aeruginosa UCBPP-PA14
MPEPLGTTALTPGFMIVHGNRLDDLRDLAVSWMRRYPLAPLESERVLVHSNGIAQWLKLALAEDPREDGGGGGGIAAALEVQLPAQFLWQAYRAVLGRESIPEVSELDKAPLTWRLMRLLPGLLERPEFRTLQRFLADDADLRKRHQLAERLADLFDQYQVYRGDWLDDWSQGRDQLRTANGQARPLGADERWQAELWRALLADVGADSLARSRSGVHRRFIEALRFASAAPRALPRRVVVFGISSMPAQTLEALAALARFSQVLLCVHNPCRHHWADIVADKDLLRHEYRRQQRRAGVPADLDEDRQHQHAQPLLAAWGKQGRDYINLLDSYDDPDSYRNLFGEVNGGRIDLFSEEAPHGLLGQLQDDILELRPLAETREHWPPVAPRSDASIRFHVAHSAQREVEILHDQLLARFNADPSLKPRDVIVMVPDINAYAPHIEAVFGQVPRDDQRFIPYTLADQGQRGREPLLIALEHLLKLPDSRFAVSEILDLLDVPALRRRFGVDEADLATLHRWIEGAGVRWGLDAAQRERLGLPAGLEGNSWRFGLRRMLLGYAVGEGAALQGIQPYDEVGGLDAALAGPLAVLLERLEVAYAELAEPATPAQWGERLQALLTVFFEAHDERDELLLTQLLQLLERWQEHCACAAFAEPLPISVIREAWLGGLDQGGLNQRFLAGAVSFCTLMPMRAIPFRLVCLLGMNDGDYPRQQSPLDFDLMRNDYRPGDRSRREDDRYLLLEALLSAREQLYVSWVGRSIRDNGERPPSVLIGQLRDHLAAGWRLDPDGDGEALLRALTQEHPLQPFSRRYFHDAPEQGVDGLFTYAREWREVHREDEIGAPDAEAPLPPLELEGALGLRALAEFLANPVNAFFQQRLKVRFDDEQLTGNDEEPFELDALDNWKLQFELTERMKRWVERDWDAEGLPAQLQAQVERLRRQGRLPLAAFGEFSARHLLQPLPDLLWRYRQEIERWPEAVEQQQELRHRHSSGLELEDWLGGLRRDASGRLARLQLLSGKLHEGRGFKWHSLVRHWLQHLALQRLGQPVSSVLVSQTGTLEIPPLPSERAGEYLDQLIDAWRQGMRQPLPVACRTAFAWLASGGAAEPEKAMREARKRYEGGFGMGGEVDASPALARVYPDFDRLLASGEFAHWAEQLYAPLLAALGRGAEEQA

SEQ ID NO: 157264 - DNA, 3705 bp, Shewanella sp. ANA-3
  CDS (1)..(3705): transl_table=11
atgctgaagttaatccaatccaatcaaatggaagtgctctgtgcccatcttgccgcgtatttgcgccagccgctacccggcgcggggttattgcaaagtgagcatattttggtgcaaagccccgggatgtcgacttggttacgccttgaaattgcaaaacaaaatggtattgccgccgcgctggagttcccactaccttccagctttatttggcaactgtgccacgatttactccccaatgtccccaaggaaaacgccttcactaaggcggctatgacctggaagctgatgcaactactgccgcggctactggatgaaccttcttttgggccactgcgccattatttgggccataccatagataatctggaatcgagcgcggctgacacccatagcaaccatcagcttggcgccataagcgccgatgatattaagctttaccagctctgcggccgcatcgccgatatcttcgaccagtatttagtttaccgccccgactggattgccgcgtgggaagctaatgagccgctcgaatcgctcaaattgaatgaggagcaaagctggcaacccatcctctggcgcgcgctgattgcctacaatcgcgatgagctgcgtcaaagccactaccatagggccaatctgcatcaggatttgattgccgcattgggggatagcgccaattccctcgcaaaattgccgcaacgtttatttgtgtttgggatctcctccatggcgccccaaaccatcgatgtgctccaccagctcgcgagccgcatcgatgtgattatcttaagccttagcccctgtcagcattactggggcgacattatcgacccacgccatcgggcgcgtatggcattgcaatatgcaggaaaacgccaattagctgagcaatgggaagataaactcgaagtcggcaatcccctgctcgccaacaatggcaagatgggccgcgaattactcgatatgctgctcgaactgcccccagagcactgtgactttggcgacgatgtgtactgcgagccctgcggcgatcctaacgatccccacactaacgcaagtatgctggctggtgtgcaatacgatattttagaaatgcagacactcgatcgggtactcgggccggatgctgagctatatcaagaggtcgcgaatcgccgggtattaacagccgacgatgattcgattctaatcaagagttgccacagcccgcttagggaagtcgaaaccctgcacgatcatttactcgacctgctggatagcgacaaccaactcacccccaaagacatagtggtaatgatgccggatgtcgccgcctacgccccctatatcgatgcggtgtttgcggccaaacagggactggaatatatcccctatgccattgccgaccgcggcgcggcgcaggaatcgccactcattaatagctttttgaatttactcaatattaatcagagccgtttcggactgacggatattttaagcattctcgaagtcccagccattttgcgacgttttcagctcgaagaagacgagctgccactcattcgccgctggttagatgaagcaggtgtgcgttggggccgcgatgaacagagccgccttaaacagggtgtgcccgccttcgagcaaaactcctgggcctttggcataaaacgcttaatcttaggctatgccttaagggacgatgcgccgctatatcagtcatccccgcagggaatgcactatttaacggtggctggggtggagggtcaatcggcacaggcccttggcaaactgttgaattttattgaagtcctcgatgagaccacccaagtattagccaaggcgcaagcgccctcactgcggttactcgaactcaccgagctgttaaacgccttttacgcccccgatgaggacgaacgagagcagctgcaggaaattcgcgatgcgattgccgccttagagcaagagctacttgccgccagccctgccgatatgggtgcacaagccaacgacttagatttaagcatcgaagtgctggcgctttggtttaatcaacgcttaaccgagtcacgtgtcggccaacgatacctcgcgggcagcgtaaatttttgtaccttaatgccgatgcgctcgattcccttcaaggtggtttgtctgctggggatgaatgatggtgtctatcctagggtgcaacatcctgtgggctttgatctgatggcccatttgggtgcgcgcaaaggcgatcgttcccgtagattagatgatagatacctgtatttagaggcgttactctcggctcgggagcagctgtacatcagttatattggccgtagcgaacgggataactcggagcgtattccatctatgctggtctccgagctaatagaatattgccagctatgttatttacctgaatcccttgcagcagaagcttctaatgtcagtaacgaagtcgcccaacaggcattgcttgaggccattgtgagccatcagccgctgcaaccttttgatcctaaactgtatcaagcagcactgccgcaagccctcacctcccatgggataaaacagagttatagccagcagtggtgtccgcccgatagcaatagccagttgcaacatggccgatttatcgaagcccatacccagatagtgctcgaagatgacgcaattggtgatagtgttcaggatattgagccgcttggcgaagcagagcatgtggatatctcggcctttattcgcttctttcgcaatcccgcgcagtatttctttaatcgtaccctgaaagtcgatttaaaccttaatattcaagcagatgataacgatgagccctttagtcttaatgcgttagagcgttatttattacaggctcagctccttggcgatgcgcttgagcaaggacaaaacgagcccagcactgaactgttacaacgccttaaagccagcggtaacttgcctatgcagccctttgatgatctgctactgcgccaatacagccatgatatcgcgccgctgatcggtagaaccctgtttatgcgcggcgatgtcgctccccggcatgccgatattcggctcagctttgagttaccccatcagaactctggaactcagttaaaagccaagcgggtgatcctcgaaggtcgaatcgatgatatcagccctaaaggattggtcacttgccgccccggcagtgcccatgggcgggacattttagccttgtatttacgtcatttatgtttgatggccgccggagtggctcaacctagctacctgcaacctagctatctgctggatatggggcattttcatgccctcgcgcccattacgccagcgcttgcccatgcgcagcttgccaacttattaaagtatttttatcagggccaaattcatcccctgtgctttatgccaagaacctccctcgcctatgccagcgctgaggcgcatgaagcgcaagactcgcacacaagcacagacccgcacaaagcacggctcgaagcggcgcagagcgaatggctggacgagcaaggtgaacttggcgaaggcacagatccccattatcagcggctgtttcattttcccgacgactttaccgaggcacattttggcaagctcgccgatgacatctatcggccaatgcttagcctgtatcacaaggataccctcgcccaactcgaggaatttgccctgaatgaagcccaaaccgccacgacagagggagcgcactga

SEQ ID NO: 157265 - protein, 1234 aa, Shewanella sp. ANA-3
MLKLIQSNQMEVLCAHLAAYLRQPLPGAGLLQSEHILVQSPGMSTWLRLEIAKQNGIAAALEFPLPSSFIWQLCHDLLPNVPKENAFTKAAMTWKLMQLLPRLLDEPSFGPLRHYLGHTIDNLESSAADTHSNHQLGAISADDIKLYQLCGRIADIFDQYLVYRPDWIAAWEANEPLESLKLNEEQSWQPILWRALIAYNRDELRQSHYHRANLHQDLIAALGDSANSLAKLPQRLFVFGISSMAPQTIDVLHQLASRIDVIILSLSPCQHYWGDIIDPRHRARMALQYAGKRQLAEQWEDKLEVGNPLLANNGKMGRELLDMLLELPPEHCDFGDDVYCEPCGDPNDPHTNASMLAGVQYDILEMQTLDRVLGPDAELYQEVANRRVLTADDDSILIKSCHSPLREVETLHDHLLDLLDSDNQLTPKDIVVMMPDVAAYAPYIDAVFAAKQGLEYIPYAIADRGAAQESPLINSFLNLLNINQSRFGLTDILSILEVPAILRRFQLEEDELPLIRRWLDEAGVRWGRDEQSRLKQGVPAFEQNSWAFGIKRLILGYALRDDAPLYQSSPQGMHYLTVAGVEGQSAQALGKLLNFIEVLDETTQVLAKAQAPSLRLLELTELLNAFYAPDEDEREQLQEIRDAIAALEQELLAASPADMGAQANDLDLSIEVLALWFNQRLTESRVGQRYLAGSVNFCTLMPMRSIPFKVVCLLGMNDGVYPRVQHPVGFDLMAHLGARKGDRSRRLDDRYLYLEALLSAREQLYISYIGRSERDNSERIPSMLVSELIEYCQLCYLPESLAAEASNVSNEVAQQALLEAIVSHQPLQPFDPKLYQAALPQALTSHGIKQSYSQQWCPPDSNSQLQHGRFIEAHTQIVLEDDAIGDSVQDIEPLGEAEHVDISAFIRFFRNPAQYFFNRTLKVDLNLNIQADDNDEPFSLNALERYLLQAQLLGDALEQGQNEPSTELLQRLKASGNLPMQPFDDLLLRQYSHDIAPLIGRTLFMRGDVAPRHADIRLSFELPHQNSGTQLKAKRVILEGRIDDISPKGLVTCRPGSAHGRDILALYLRHLCLMAAGVAQPSYLQPSYLLDMGHFHALAPITPALAHAQLANLLKYFYQGQIHPLCFMPRTSLAYASAEAHEAQDSHTSTDPHKARLEAAQSEWLDEQGELGEGTDPHYQRLFHFPDDFTEAHFGKLADDIYRPMLSLYHKDTLAQLEEFALNEAQTATTEGAH

SEQ ID NO: 157266 - DNA, 3291 bp, Mycobacterium avium 104
  CDS (1)..(3291): transl_table=11
atgccgcttcacctgcaccgtgccgagcgcaccgatctgctggccgacggtctcggcgcgctgttggccaatccaccggccgacccgttcgccctcgagctcgtcgtggtgcccgcgcgtggggtggagcgctggctgagtcaacggctgtcgcatgtgctgggccgcgcccgcgacggggacggggtctgcgccggcgtgcaattccgcagtcccggctcgctgatcgccgagatcaccggcacggccgaggacgatccctggtcgccggacgctctggcctggccgctgctggaggcgatcgactgttcgctggacgagccgtggtgccgcacgctggcgacgcacctgggccacttccacagcggcgccgaggccgagctgcgccgcacccgccgctacgaggcggcgcgccggctggccgggctgttcgccggctacgcccggcaacggccgcggctgctggtcgactggctcgacggcgacccgggcgatctggacgaggacctgcgctggcaaccgccgctgtggcgggcgctggtggcccgggtggccgccgatccaccgcacgttcggcacgccgaaaccatcgcccggctgcggcgggcgcccagcgacctgccgcagcggctgtcgctgttcgggcacacccggttggcgtgcaccgacgtggagctcctggacgcgctggccacccaccacgacctgcacctgtggctgccgcacccgagcgaccggttgtggcgcgcgctggccggcacgaacggcgtgatcccccggcgcgacgacaccagccaccgcgccgtcgcccacccgctgctggccacgctgggacgggatctgcgcgaactgcagcgcggcctgccggcggatccgcggaccgacgagtacctcgccggcgacgcccgccccgacacgctgctgggctggctgcagtccgacatcgccgccaatgccattcgcccggttggccgctcgctggccgccggggaccgctcggtgcagatccacaactgccacgggccggcccgccaggtcgacgtgctgcgcgaggtgctgctgggcctgctcgccgacgacccgacgctgcagccgcgcgacatcctggtgatgtgccccgacatcgaaagctacgcgccgctgatcatggccgacttcggcctcggcgacgtggtgcacggcgcgcaccccgcccaccagctgcgggtgcggctggcggaccgttccctgatccagaccaacccgctgcttggggtggccgcgcagctgctggccctggccggcggccgggtgcgggccagcgaggtgctcaacctggcccagacgccggcggtgcgcgcccggttcggcttcaccgacgacgatctggaggccatcaccggatgggtccgccaggccaacatccgctgggggctggaccggcagcatcggcggccctaccacgtcgatttcgtgcacaacacctggcgtttcggcatcgaccggatactggccggcgtcgcgatgtccgacgactcgaacgcatggatcgacgcgacgctgccgctcgacgacgtcagcagcaatcgtgtccaattggccggccagctcgcggaattcgtcgcccggctgcagcacgtcctggactcgctcaccggtgcccggccgctgaccgaatggctcaccgccgtcgccgacggcatcgccctgctgacccgggtgcgcgatgccgacgaatggcagagcggtcagctgcagcgcgagttcgccgcggtgtccgcgcaggccggatcccgcgccgacaccgtgctgcggctgcccgacgtccgcgcgctgctgacccggcacctgtccggacgcccgacccgcgcgaatttccgcaccggcacgctgacggtgtgcaccatggtgccgatgcgttcggtaccgcaccgggtggtgtgcctggtcggtctggacgacgggctgttcccgcggctcggtgtcgtcgacggtgacgacgcactgtcgcgctgcccgatgaccggggagcgcgacatccgttccgaggaccggcaattgctgctcgacgcgatcggcgcggccaccgagaagctggtgatcacctacaccggcgccaacgagtattcgggtcagccgcgcccgccggcggtgccgctggccgaactgctggacaccctcgacataaccaccgccgagccggtgcgcgaccgcatcgtcgtgcgacatccgttgcagccgttcgacattcgcaacgtcatccccgacgagctggtgcccggggtgccgttcagtttcgaccccaccgtgctgcgcgcggcgcgcgcggccaccggcgaacactgcgagccaccgaagttcatctccgcgccgctgccgcccccgccgcccgctgacgtaatcctggccgatttggtcggcttcttcaaagacccggtgcaggggttcttccgggccctgcagttcacgctgccccacgacgtcgacggagtgcaggacgcgatgccggtggacatcgacgccctgcaggagtggacggtcggcgatcggatgctgcgcgacatgctgcgcgggatgaccccggaggacgcgcggcaggccgagtggcgccgcggcaccctgccgccgggacagctgggctggcgcagggtgaccgagatccgcgaccaggcagcccgattggcgcgggaggcgcaccagcaccgggccgagcagccgggcggcgcccacgacgtcgacatcgatctgggccgcgggcgccggctcaccggcacggtgaccccggtctacggcaaccgcctggtcgcggtgacctattcgcggctggacggcaggcatctgctcgagtcgtggattccgttgctggcgttggccgctcacgatcgcggccgcgactggtcggcggtgtgcatcgggcggatgcgccggggcaccggcatccgggtgcagcggctcgggtcgccggacgacgatcccgtcgagctgctgcacgagctggtgagcatttacgacgccgggcggcgcgagccgattccgttgccgctcaagacctcctacgcgtgggcggccgcccgctacggcggcgacgacccggtggccgaggcccgctaccggtggaagtccagcgaccgctacccaggggaggaccaggcgccggcgcatgtgcgggcctggggacgcggtgcgccgctggacgacctgatgcagccggtacgcccgggcgaggagtgcgacggcgaggacaaccggctcggcgcctacgcggcccggctgtggctgccgatgttgcgggccgagcggacgacggcgtga

SEQ ID NO: 157267 - protein, 1096 aa, Mycobacterium avium 104
MPLHLHRAERTDLLADGLGALLANPPADPFALELVVVPARGVERWLSQRLSHVLGRARDGDGVCAGVQFRSPGSLIAEITGTAEDDPWSPDALAWPLLEAIDCSLDEPWCRTLATHLGHFHSGAEAELRRTRRYEAARRLAGLFAGYARQRPRLLVDWLDGDPGDLDEDLRWQPPLWRALVARVAADPPHVRHAETIARLRRAPSDLPQRLSLFGHTRLACTDVELLDALATHHDLHLWLPHPSDRLWRALAGTNGVIPRRDDTSHRAVAHPLLATLGRDLRELQRGLPADPRTDEYLAGDARPDTLLGWLQSDIAANAIRPVGRSLAAGDRSVQIHNCHGPARQVDVLREVLLGLLADDPTLQPRDILVMCPDIESYAPLIMADFGLGDVVHGAHPAHQLRVRLADRSLIQTNPLLGVAAQLLALAGGRVRASEVLNLAQTPAVRARFGFTDDDLEAITGWVRQANIRWGLDRQHRRPYHVDFVHNTWRFGIDRILAGVAMSDDSNAWIDATLPLDDVSSNRVQLAGQLAEFVARLQHVLDSLTGARPLTEWLTAVADGIALLTRVRDADEWQSGQLQREFAAVSAQAGSRADTVLRLPDVRALLTRHLSGRPTRANFRTGTLTVCTMVPMRSVPHRVVCLVGLDDGLFPRLGVVDGDDALSRCPMTGERDIRSEDRQLLLDAIGAATEKLVITYTGANEYSGQPRPPAVPLAELLDTLDITTAEPVRDRIVVRHPLQPFDIRNVIPDELVPGVPFSFDPTVLRAARAATGEHCEPPKFISAPLPPPPPADVILADLVGFFKDPVQGFFRALQFTLPHDVDGVQDAMPVDIDALQEWTVGDRMLRDMLRGMTPEDARQAEWRRGTLPPGQLGWRRVTEIRDQAARLAREAHQHRAEQPGGAHDVDIDLGRGRRLTGTVTPVYGNRLVAVTYSRLDGRHLLESWIPLLALAAHDRGRDWSAVCIGRMRRGTGIRVQRLGSPDDDPVELLHELVSIYDAGRREPIPLPLKTSYAWAAARYGGDDPVAEARYRWKSSDRYPGEDQAPAHVRAWGRGAPLDDLMQPVRPGEECDGEDNRLGAYAARLWLPMLRAERTTA

SEQ ID NO: 157268 - DNA, 3342 bp, Nocardioides sp. JS614
  CDS (1)..(3342): transl_table=11
atgaccctgcagatccaccgagcctcgcgcaccgacgtgctcgcggacgcgctcggggacctgctgcgcaccccgctggccgacccgttcgccgaggaggtcgtggtcgtcccggccaagggcgtggagcggtggctgacccagcggctcagccaccgcctcggcgccggaccgcgcggtgacgacggggtctgcgcgggggtccggttcctcaatccgcggtcgctggtgtcgctcctgctcgggcgcgagcgcgacgacccgtgggaccccgagcggctcgtctggccgctgctcgcgacgatcgacgagagcctcggcgagcgtgagttcgcgacgctcgggcggcacctcggccacggcgtggacggcgccgacggcgagctgcgccgcaaccgccgctactcggtggcgttgcggctggcgcacctgttcgcgtcgtacgcactgcagcggccgtcgctggtgaccgcctggcgggagggccgcgacggcgagcacggtggcgagcaggggctgccgcccgacctggcctggcagcccgagctgtggcgccggctgatcgcccaggtcgacgcgccccctcccgatgtccggcacgcccagacgtgcgcggctctgcaggcgggcggcgacggcctgccgctgcccgaccggctctcgctgttcggccacacccggatcccggtgaccgaggtcgcgctgctgaaggccctgggggagcaccgcgacgtgcacctgttcctgccccagccctcgccggtgctctgggacgacctggccgacctcggcggacccgggggcgtcgtgccccgggcggccgacgactccgtcgagcgggtcggacatccgctgctcgcctccctcggccgcgacgcgcgcgagctccggcggctgctcgacggcgtctcgtcggaagaggtgcgcccacctgcggggaccccgaccggatcgaccaccgacccggtgaccctgctcggctggctccagcacgacctgcgcgccaaccacgccccgtcgtacgacgagcgctcgacgcgcgagctcgacccggacgaccacagcctgcaggtgcacgcctgccacggcccggctcgtcaggtcgacgtgctgcgcgaggtgctggtcggcctgctcgaggacgacccgaccctcgagccgcgcgacgtcctggtgatgtgccccgacatcgagacctacgcgccgctgatctcggccgggttcggtctcgcgaccaccgacgggcaccccgcccaccggctgcgggtgaagctcgccgaccgcgcgctcaccagcaccaaccccctgctcgccgtcgccggggacctgctcgacctggccggcggccgggtcaccgcgtccgacgtgctcgacctggcgggcaccgacccggttcgccgccggttcgggttcaccgacgacgagctggaccgggtgtcgcggtgggtggcccgcgccggcgtccggtggggcctcgacgaggagtcgcgcgcggcgttccggatggagcggttcccccacaacacctggcgcaccggcctcgaccggatcctgctgggcgtcgccatgagcggcgacgaccaccaccacctcggccgggggctgccgctcgacgacgtcgccagctccgagatcgacctcgcgggacgtctcgccgagctggtcgcgcgggtcgaccgcaccttgaccgtgctcgccggcgcgcggacggtcgccgactgggccaccggcctgcgcgacggcgtccggtcgctcgtcgacgtcgcggccgacgacgcctggcaggtcccgcagttcgagcgcgagctcgggcgcgccgccgcgtcgtcgcacgagggtgggctcgagctgcggctcgccgacgtgcgcgcgatgctcgagtcgcggctggccgggcgcccgacccgcgccaacttccgcaccggcagcctgaccgtcgccaccatggtgccgatgcgctcggtgccgcaccgcgtggtctgcctggtcggcctcgacgacggggtcttcccgcgcgcgggtgcggtcgacggcgacgacgtgctcgggcggcatccgctcaccggcgagcgcgacgtccgcagcgaggaccggcagctgctcctggacgctgtcctcgccgcgaccgagcacctcgtcatcacctactccggcgccgacgagcagtccggggcgagcctcccgcccgccgtacccctcggcgagatcctcgatgccgccgaccgcaccaccaacgcgccggtccgcgaccgggtcctgacccgccacccgctccagccctacgacgcacgcaacttcacccgcgagcgcccgttcagcttcgacaccgccgcgctggccggcgcccggtcggcccggggcgtacgccgcgagccgccgccgctgctcgacgggccgctgccaccacggcttgccctggacgggagggccgcggacgtgtcgctgcaggacctgcgcgacttcctgggtcacccggtccgggccttcctgcgtgggcggctggacgtggcgacgccgttcgagcccgacgacctggccgatgcgatcccggtgtcgctcgacagcctggagaagtggcagatcggtgaccggctgctgcggcagctgctcgccggccaggacccggtcgccgtgctgaccgccgagcagctcgccggcacgctgccgccgcgcgggctcggcaccctcgcgctccacgaggtcgcggaggagtgccagcggctgtggtcgcgcaccgccgacctgcgcgacggcgagcgccggtcggtcgacgtcgacgtcgacctgcgtgacgggcggcggctcaccggcacggtgcccggcgtctacggaagccgggtggtcagcctcggctactcccggctcaacgcgcggcagcggctgcacgcgtgggtcgacctgctcgcgctgtcggcgacctaccccgaccagcactggacggcccacgcggtcgggaaggaccgcgcgggtccgaagcgcgcgctgtgcggaccgctcgaccaccgcgccgtcggctggctgcgcgacctggtcgacctccgcgaccgcggcctctgcgctccgctgccggtgccggtgaagaccggagccgcgtgggcggacgcccacgcgcgcgagctgatgggccaggaccacccgccggtcgaggccgcgcgacgggagtgggagaccgacccccacaaccagttcggcatcaccggcgaggacgccgacccctaccaccagcgcgtctacggcccggctgcgcccgtcgaggccctgctcgacgccggtctcggtgagcacgcctgggcgatctgggagccgctgctgaccggcggcgaaagggtcggccccctgtga

SEQ ID NO: 157269 - protein, 1113 aa, Nocardioides sp. JS614
MTLQIHRASRTDVLADALGDLLRTPLADPFAEEVVVVPAKGVERWLTQRLSHRLGAGPRGDDGVCAGVRFLNPRSLVSLLLGRERDDPWDPERLVWPLLATIDESLGEREFATLGRHLGHGVDGADGELRRNRRYSVALRLAHLFASYALQRPSLVTAWREGRDGEHGGEQGLPPDLAWQPELWRRLIAQVDAPPPDVRHAQTCAALQAGGDGLPLPDRLSLFGHTRIPVTEVALLKALGEHRDVHLFLPQPSPVLWDDLADLGGPGGVVPRAADDSVERVGHPLLASLGRDARELRRLLDGVSSEEVRPPAGTPTGSTTDPVTLLGWLQHDLRANHAPSYDERSTRELDPDDHSLQVHACHGPARQVDVLREVLVGLLEDDPTLEPRDVLVMCPDIETYAPLISAGFGLATTDGHPAHRLRVKLADRALTSTNPLLAVAGDLLDLAGGRVTASDVLDLAGTDPVRRRFGFTDDELDRVSRWVARAGVRWGLDEESRAAFRMERFPHNTWRTGLDRILLGVAMSGDDHHHLGRGLPLDDVASSEIDLAGRLAELVARVDRTLTVLAGARTVADWATGLRDGVRSLVDVAADDAWQVPQFERELGRAAASSHEGGLELRLADVRAMLESRLAGRPTRANFRTGSLTVATMVPMRSVPHRVVCLVGLDDGVFPRAGAVDGDDVLGRHPLTGERDVRSEDRQLLLDAVLAATEHLVITYSGADEQSGASLPPAVPLGEILDAADRTTNAPVRDRVLTRHPLQPYDARNFTRERPFSFDTAALAGARSARGVRREPPPLLDGPLPPRLALDGRAADVSLQDLRDFLGHPVRAFLRGRLDVATPFEPDDLADAIPVSLDSLEKWQIGDRLLRQLLAGQDPVAVLTAEQLAGTLPPRGLGTLALHEVAEECQRLWSRTADLRDGERRSVDVDVDLRDGRRLTGTVPGVYGSRVVSLGYSRLNARQRLHAWVDLLALSATYPDQHWTAHAVGKDRAGPKRALCGPLDHRAVGWLRDLVDLRDRGLCAPLPVPVKTGAAWADAHARELMGQDHPPVEAARREWETDPHNQFGITGEDADPYHQRVYGPAAPVEALLDAGLGEHAWAIWEPLLTGGERVGPL

SEQ ID NO: 157270 - DNA, 3420 bp, Azoarcus sp. BH72
  CDS (1)..(3420): transl_table=11
atgttctccatcgtcttctccaaccgctacgaatgcctgcaagcgatgctgctcgagcgtctcgccgccgagcgtcccggccccttcggcaagcgccatgtggtggtgccgagcagcgcgctgcggcgcgatgtcgagctggcggtggcggagcacgagggcgtctgcgccaatgtcgagttctcctacctcgcgcagtggctgtggacccagatcgggcacgtggtggaggtgccggcgcgctcgccgtttgcgcccgcgctgctggcgtggcgggtccatgcgctgctcgacccggccgcgccggcgggcgactgggtggcggcgcatccgcgcctggcgcactacctggcgggcgcggatgcgcgcatgcgcttcgaactcgccgagcgtatcgcccgcgtgttcgaccactacctcacctaccgggcgcactggctggaaagctgggcgcgcggcgagcgggcgcggctgggcgaggcgaccgaggcggagcgcgcggacgaggcgtggcaggcggcgctgtggcgccacatccgtgacggcttggcgctgcgccaggaacacccggccgcgttgttcctgcgccgggtcgccggcatggacgagcgcgcgcttgccgccgccggcctgccgcagacggtgcatgtgttcgggctgccggcgctgccgccgctctatctggcgatcctgcgcgagctggcgcgggtggtggacgtgcgcctgtatgcgctcaatccctgccgcgagttctggttcgagatcgtcgatccgcgccggctgtcgtggctggcggcgcgccaggccgacatgttccatgaaaccggcaaccgcctgcttgccgcttgggggcagcagacccaggcgcatatcgggctgctgttcgagggcgagcgcgaggtggtggaagaggcgctgttcgagccccatcccgggcgccatctgctcgcgcggctgcacaacgcgatcctcgacatggaagagctggagccgggcagcgttgcgctggcggcgaacgaccgcagcatcgagctgcacgtgtgccattcgcgcacgcgcgagctggaggtgctgcacgaccgcctgctcgacctgatgaaggccgcagcgaagcggggcgaaccgctgcggcccgacgagatcgtggtgctgacgcccgacctcgatgccaccgcgccgctgatcgaggccgtgttcggcaccgcccccgccgcgcgccgcatcccgtggcgcatcaccggcctcggcggcacccaggagaacccggtggccgccgcgctcgaccgcctgctcgcgctggtggccgggcgcctgcccgcgagcgcggtgttcgatctgctgcagcagccggtggtggcagcgcgcttcgggctgggcgagggcgatctcgaaaccatccacgactggatgcgcgcggccggcatccgctgggggctggatgccgagcacgccgccgccgcgggcggggtgccggtgcaggcctgcggcgggcatacgctggatgccggtctggaccgcctgttcctcggctgggcggcgggggatgcggccaccgcggcgccgttcgccggcttcatcggcgccggcgcggcggagggcaacgccgcgctggcgctcggccgcctgtggcgctacgtggacaccctgcgcgggctgcgcgccgacctgcaacggccgcagcaggccgccggctggcggcgcgcgctggacagcgcgctgacgcgcctggtgggcgacgagccggaatgggcggaagcgctgcgcgaggtgcgcgaggcgatcgtcgcgctgacgcaggcaatggcggccgctgccaccgacgacggcgacgcgccggcgattccgctcgcggtggtgcatccggcgctcatcgcgcagctcgacgatcccgcgcgcggcggcgtgccgggcggcaccgtcacgttctccgcgctgtcctcgctgcgcgggctgccctaccgcgtggtgtgcgtcgtagggctggaccaggggcttttcccgggcagcgaccgcccggccgaattcgacctgatggcggcgcgccccgagcgcggcgaccgtcagcgccgccatgacgaccgcaacctcttcctcgacgtgctgctgtcggcgcgcgaagtgctgcacctgtcgcacgtcggccgcagcgtgcgcgacggctccgcgctgccgccgtcggtgctggtcgatgagttgttcgacgtgcttgctgccgcctgcgcggcggacccgggcaagccggacgacctcgccgcggcgcgccggcgactgacggtggagcatccgctgcaggcgttctcggccgagtatttcctcccgcagggcgaacgcgacccgcgcctcgtgagctatcacgaggaatacgcggcggcactcgcggcgcggctcggcgccccgctgcgcgacgcggacgacgacgcgctggtcgcgctcgccgaggagggcgacgaggtggccgtcgatggtgcccgcgtgcccttcttcgatgccccgctgccgccgcccggcccggaatggcgcgaggtcggacttccgcagctgatccgcttcttccgcaaccccagccgctacctgctgcgcgaccgcttggggctggcgctgcccgagggcgaggcggagctggaggatgtcgagccgatggtgcccgacttccttggccgccaggcgctggccgagcgcctgctgccggcgctgttgggcgccacggtgccggacgaggaggcgctgctcgcgcttgcccgcgccgggggcgaatacccggcgggcgcgctcggcgagggcgcgctgcggcgcgaactggcgcagctgacggtgtttgcggccggggtgcgtgccgagctgcccgcccggccgctgccgccgcatgtgcccacgctcgcgttcgacctcgacggcgaaccgtggacgctcggcgccgcgttcggcgacctgcgcccgcagggcctgctgcgccagcgttacgacgactgccgcccggtggattacctcgccgcctggctcgcccacctggtgctgtgtgccgcgccggcgccggacgttgcgtgcgagaccacgctgctcgcgcgcgacggccgctgccgcttcgtcgcggtgccgcccgcgactgcgcacgcgctgctggccgactgcctgcgcctgtaccgggccggcctgctgcggccgctgcacttctttccgaaggcggcgtgggcctacgccgtcaatggcgaaagcatgggcaaggcctacgcgcgctggcagggcggcaaccgcccggccttcgccgaaagcgccgaccccgcctatcgcctcgcgctgcgcggcgtggccgatccgctcgccgacgacttcgccgccctcgccagccgggtgcttgggcccttgctggaccacctggacgacccgcgcctcgacctcgcgccggcgcaggagagcgcatga

SEQ ID NO: 157271 - protein, 1139 aa, Azoarcus sp. BH72
MFSIVFSNRYECLQAMLLERLAAERPGPFGKRHVVVPSSALRRDVELAVAEHEGVCANVEFSYLAQWLWTQIGHVVEVPARSPFAPALLAWRVHALLDPAAPAGDWVAAHPRLAHYLAGADARMRFELAERIARVFDHYLTYRAHWLESWARGERARLGEATEAERADEAWQAALWRHIRDGLALRQEHPAALFLRRVAGMDERALAAAGLPQTVHVFGLPALPPLYLAILRELARVVDVRLYALNPCREFWFEIVDPRRLSWLAARQADMFHETGNRLLAAWGQQTQAHIGLLFEGEREVVEEALFEPHPGRHLLARLHNAILDMEELEPGSVALAANDRSIELHVCHSRTRELEVLHDRLLDLMKAAAKRGEPLRPDEIVVLTPDLDATAPLIEAVFGTAPAARRIPWRITGLGGTQENPVAAALDRLLALVAGRLPASAVFDLLQQPVVAARFGLGEGDLETIHDWMRAAGIRWGLDAEHAAAAGGVPVQACGGHTLDAGLDRLFLGWAAGDAATAAPFAGFIGAGAAEGNAALALGRLWRYVDTLRGLRADLQRPQQAAGWRRALDSALTRLVGDEPEWAEALREVREAIVALTQAMAAAATDDGDAPAIPLAVVHPALIAQLDDPARGGVPGGTVTFSALSSLRGLPYRVVCVVGLDQGLFPGSDRPAEFDLMAARPERGDRQRRHDDRNLFLDVLLSAREVLHLSHVGRSVRDGSALPPSVLVDELFDVLAAACAADPGKPDDLAAARRRLTVEHPLQAFSAEYFLPQGERDPRLVSYHEEYAAALAARLGAPLRDADDDALVALAEEGDEVAVDGARVPFFDAPLPPPGPEWREVGLPQLIRFFRNPSRYLLRDRLGLALPEGEAELEDVEPMVPDFLGRQALAERLLPALLGATVPDEEALLALARAGGEYPAGALGEGALRRELAQLTVFAAGVRAELPARPLPPHVPTLAFDLDGEPWTLGAAFGDLRPQGLLRQRYDDCRPVDYLAAWLAHLVLCAAPAPDVACETTLLARDGRCRFVAVPPATAHALLADCLRLYRAGLLRPLHFFPKAAWAYAVNGESMGKAYARWQGGNRPAFAESADPAYRLALRGVADPLADDFAALASRVLGPLLDHLDDPRLDLAPAQESA

SEQ ID NO: 157272 - DNA, 3210 bp, Neisseria meningitidis FAM18
  CDS (1)..(3210): transl_table=11
atgttttatctgtatcaatccaaccgtcttgaaacgctggcggcattgtttgcccgcattcaaaaagtcaaaccgctgaaatcggctttacagcccgaacagattattgtgcagagtcaggggatgcgccgctatctcaatacctgcctcgcccgcgatttgggcgtggcggcgaatttgtcgttcagcctgcccgccggcctgacgtggaagctgatgaaaaaactgattcccggtattccggaactcagcccgtttgcacccgaagtcatgcgctggcggctgctggatttgttccgcagtgaagcattccggaatacggcagaatttgaagatgtgaggaatgtgctgcaagactatctgggcagcggcgaatcggcagattaccagcttgcgggacagcttgcggacatattcgaccaatacctcgtgtaccgtcctcagtggatagacgcttggcagcagggcaggcggctcggtttgggcgacgacgaaatctggcagtccaaactgtggcgttacctcgacgatggcaggcagagcgcgccgcaccgtgtcgcgttgtgggaaaagctgcttgccgcgttggacaaggataagctgcccgagcgttatttcgtgttcggcatttccacgatggcgccgatgtatcttcagcttttgcacaagctgtccgaacattgcgatgtgttcgtgttcgcactcaatccgagcgggatgtattggggcaacgtcatcgaagcggcgcaaatcctcaaaggcggcggcgatcccgatttaactcaggcagggcatccgctgctcgcctcattgggcaagcaggggcgcgactttttcgactttttgaacgaaatggaaatagaaggagaaacgccggtatttgaagaaggcgggcgcgatacgcttttgcacgccctgcaaaccgatattcaaaacctgaaaatgccgtctgaaaatgtgggaagcgtcaacacgggcgacggctcgatacgcatcgtctccgcacacagccccttgcgcgaattgcagatactcaaagacaagctgttgaaaattctgcatgaacatcccgattggcagccgcatgatatcgccgtattaaccccgcacatcgaatcctatacgccttttatcgaagccgtgttcggacaggcgcagcccggtgcgcaggcattgccgtattccgtttcagacgtgaaaatcagccgccgacaaccgctgtttcatgctttgtcatgcctgttcgacttgttggaaagccgatttgaagtcgataaagtgcttgtgcttttagaaaccgcacccgtgttgcgccgtttcggactgactgaggacgatttgccgcttttgcacgatatggttgccgatttgaacgttcactggggtttggacggagaaatgcgcggcggcacggatcagctgtttacctggaagcaggcggtagaacgcatgatattgggctggatgctgcccgaaggcggcaacccgatgtggcaggatgtcagcgcgtggtatgccgacgtgaaccaaaccgccctgttcggacgttttgccgccctcctcgaaaccctgtcggatattgtacggatatggcggcagcccgcaacgatcggcgaatgggtggcgcgttgccgggatttgcttgaaacattgttccaagctgaagccgatgaccaaaagtcagtccaaaaccttgaaaacgaatgggtcaaatggcaggcggaaacagaattggcgcaattttccggacagttgccgcaacaaaccgtcatccgccatatccgacgtttcctcgacagcgaaagcgaggcaggctttttacgcggcggcatcaccttttgcagtatggtgccgatgcggagcctgccgttcaaagtcatctgcctgttgggtttgaacgacggagattttccccgcaataccaaagccgccgtattcgacctgattgccaaacatcccgccaaaggcgaccgcgcccgccgcgatgacgaccgctacctcttcctcgaagccctcatcagcgcgcgcgaaatcctctacctgtcctacatcgggcgcgacatccgcaaagacgaagagcttgctccgtcttcgctgttgggcgaactcatcgacacagttgccgctatggcgggcatcggtagccgccaacttgcacaaaactggatagaacagcatccgctgcaagccttctcgcgccgatattttcaagaaggcggacgttcagacggcatattcggcacgcgtaccgactacgccactgcgctcggacaaacgcccgaaccgccgcaaccctttttcgaccaacccgtagaaaacgccgaacctgttgccgaaatcggacaggacgaatttatccgtttctggcgcaaccccgtcaaagtatggcttcagcagcagcttgcgtggagcgaaccccatatcggcgaagcctgggagcctgccgaacccttcgagccgcaacacgccgatcaaatcgccgaaacctacatcgaagcacggcgcgaaggacgggattttgcccaaaccgccgcccgcatcggggcggaaagcctcctgccgtcgggagagttgggcagactttggcagcagaacttccaaactgctgccaaacaaatcgacacggcggttttaaacagccccaaactgccaccgctttcatatgccataccgtcggacgggcaaatcctgaaaggcagcttgggcaatctgtaccgctgcggacaagtgttttacgcctacggcaaacccaacgcgccgcaacgtatcgcttttctgctggaacacctgatattttgcgccgttatgccgtctgaagccgaaacgcggcaaacctttatcgtccaatccggagaaaccgaaatattggcggaaatcgcgcaagacagggcattgcagctattgtcggaatggatggcgtttttcaatatcgggcaaaaccgcccgctgccgttttttgccaagacctcgcttgccgctgccgaagcgtttgcccaaaaacaagattgggaagccgccctgaaaaaagcccaaaccgcctattacggcaacaaagtcagcaaagggcagaaagactataccgaagtcgccctcgtgttcggcaacgcaagccaaaacccactcgaacaacccctgtttgaaaacctcgcccgcctgcttgccgacacgcttgccgcagcggaaaaaagggaaggggccggagcagcctga

SEQ ID NO: 157273 - protein, 1069 aa, Neisseria meningitidis FAM18
MFYLYQSNRLETLAALFARIQKVKPLKSALQPEQIIVQSQGMRRYLNTCLARDLGVAANLSFSLPAGLTWKLMKKLIPGIPELSPFAPEVMRWRLLDLFRSEAFRNTAEFEDVRNVLQDYLGSGESADYQLAGQLADIFDQYLVYRPQWIDAWQQGRRLGLGDDEIWQSKLWRYLDDGRQSAPHRVALWEKLLAALDKDKLPERYFVFGISTMAPMYLQLLHKLSEHCDVFVFALNPSGMYWGNVIEAAQILKGGGDPDLTQAGHPLLASLGKQGRDFFDFLNEMEIEGETPVFEEGGRDTLLHALQTDIQNLKMPSENVGSVNTGDGSIRIVSAHSPLRELQILKDKLLKILHEHPDWQPHDIAVLTPHIESYTPFIEAVFGQAQPGAQALPYSVSDVKISRRQPLFHALSCLFDLLESRFEVDKVLVLLETAPVLRRFGLTEDDLPLLHDMVADLNVHWGLDGEMRGGTDQLFTWKQAVERMILGWMLPEGGNPMWQDVSAWYADVNQTALFGRFAALLETLSDIVRIWRQPATIGEWVARCRDLLETLFQAEADDQKSVQNLENEWVKWQAETELAQFSGQLPQQTVIRHIRRFLDSESEAGFLRGGITFCSMVPMRSLPFKVICLLGLNDGDFPRNTKAAVFDLIAKHPAKGDRARRDDDRYLFLEALISAREILYLSYIGRDIRKDEELAPSSLLGELIDTVAAMAGIGSRQLAQNWIEQHPLQAFSRRYFQEGGRSDGIFGTRTDYATALGQTPEPPQPFFDQPVENAEPVAEIGQDEFIRFWRNPVKVWLQQQLAWSEPHIGEAWEPAEPFEPQHADQIAETYIEARREGRDFAQTAARIGAESLLPSGELGRLWQQNFQTAAKQIDTAVLNSPKLPPLSYAIPSDGQILKGSLGNLYRCGQVFYAYGKPNAPQRIAFLLEHLIFCAVMPSEAETRQTFIVQSGETEILAEIAQDRALQLLSEWMAFFNIGQNRPLPFFAKTSLAAAEAFAQKQDWEAALKKAQTAYYGNKVSKGQKDYTEVALVFGNASQNPLEQPLFENLARLLADTLAAAEKREGAGAA

SEQ ID NO: 157274 - DNA, 3381 bp, Haemophilus influenzae R2866
  CDS (1)..(3381): transl_table=11
atgttcattgtttattattccaatcagcttgaaaaacaaaaagaaattctttcttcattattcaaatctttaccgcctgaagatccttttcaacaagatattatcttggtacaaagccctaatatggcgcaatggctacaaattgaacttgccaaagaaacaggtatttcagcaaacctaaaatttcctatgccagccagttttatttggcaactttatgcacaaaatttacctgcaacggcattagagaacccttttgataaagattcaatgatgtggcgtttaatgcgcttaatcccaatttttcttgagaaagaaaatttttcgcctctacgcaattatttatcatcttcgccacattctgaacaatataaactttatcaactcagcagtaaaatagccgacttatttgaccaatatttagtttatcgacctgaatggatttttgcttgggaaaaaggcgaagatgaacaaatcactgctcaaatacaaaaacagcaacctaacctaaacgcaactttgtttgcgcaaattcaaggcaatacaaaatggcaaggtgagttatggcgtgcgttggtcgtcgatgttaaatcagatgtgggtgatgccacccatcgagcggctttgcataatcaattcttagccttgcttgccgataaaaaagcaccgaaaaaattaccttcacgcatatttatttttggtattcctgcgcttccaactgcttatcttaatattttgcaagcgatatcctctgaagtggatattcatttattttttaataatccttgccaagaatattggggagatattagcgatttacgccttgattatttgcgttctcgtcagcgttatcaattcaataaacaagatgaagatcaaccgctcttttccgaggatcaactttctcaattagaaaacgctcagtttgacgtcacttatcaaaaagaaaaccttcaactaggcaatccattactggcggcttggggaaaaatggggcgagattttctctatacattggtgagagatgaagaacatattccaacttatcccgtcaatgcctatcaagaaattgagtcgaacagtttgcttgggcaattacagtctcaaattctgcatttagaaaataaaccgttaaatatcgcaaaaaatgaccgcactttaaccctacattcttgccacagtgctatgcgagaagtggaagtattgcacgattatttactggatttattcaatcaagatcctagccctacgccaaaagatgtggttgttatggtggcagatattaaccaatacacaccctatattcaggcagttttcgggcaaaaaaatggagatgcgccacaaattccattttcactttcagataataaactttcagaaagcgatgtgttggtctcaagttacttaactttattaggcttaaaagaaagcaattttagtgcagaggatgttttagcgttgttggatatccctgctatgcgagaacgatttaatatttcccttgctgatttaccattagtgcgagaatgggtaacggattcagggattcgtttcggtttgcaaaaaaatcaagatggcatcaatttcaattcttggcaggctggattagaacgaatgattttaggctatgcgatgcgtgaagaacagggcatttggcaagatagtctgggcttaaacagcagttatggcttaaagggcgagcttgctggaaatttatctcattttttcaccgcactttccgcgctgcatgaaacgctgcaacaatcacattccatcgaaaaatggcaagaaattttaaccgcacttttatcggatttcttcgtgcgaaatgaagacacaagcgacatgattttctatattcaagagaaaattaatgaattagctgagcatctaaaaacgatccattttaatgaagaattacaagcagaagtgatcgccgatgtcatcacaatgaaattggaagatgcgccaaatagcctcaaattccttgcaggaaaagtaaatttctgcaccttattaccaatgcgttcagtgccattcaaagtggtttgtttacttggaatgaatgatgcggattacccaagaacacaaacaccaaacagttttgatttaatgcaatatcattatcaaaaaggcgatcgtgttcgtcgtgatgatgatcgctatttgttcttagaagccttattggccgcacgtgattattgctatatcagttatgttggccgttccattacagataatcaagcgaaagaaccttctgtattggtaagccaactgttggattatattaatcaagggcaaaaggaaaatgtccttactgtcattgaacatccaatgaccgcatttagcccagataatttcaaaaacaacgaaaaatttacccgctcttttgcgacaaaatggttgccaatagcacaatttgacacggcggctagcaattcagaatttgccgtcactatgacagaaaacccagaaaaaatcgaagaagttgaagtggattctttagtcagctttgtggaaaatccagtgaaatttttctttgaaaaacaacttggtgtttatttccgcgataaagatgaacgcattgctgacagtgaaaacttcactttaagtgggttagataattattctctcaataatgacttaatttaccttgatgaacaaaattttgctgattattttagacaagcagaagtaaaaggcgtgttaccgcgtgctgagtttggaaaggtttatgctgaaaatattcgcgacaatgttttagaatttaaagagaaaatagccgatcttggcgagcctaaacaggcttctatagattttaatattgccgtagattggcaaaacgaaaatcaaaaaatccgtttatttggttatatggacgctttatttggcgataattcacaagtcattcactggcattttgcgaaatacaaagatcgttattgtattcgtccttggatttattatttaattcaatgtgttacacaagaaaatgcggtaccagcaaaattaattacgcaagataaggttctcgaattaccgcctattgagcgtgaagttgcgcttgctcaattacaaatttacgtaaaagattatttacaaagccaaatagaaatacaattggtgccaaccataagaaatattaatgattttattgtagacgatgaaagtgcggtagattttgacaacgtttttgaaaaacttcaggcattaactgaaagtaatggtttcggttcaaaagccgatccatattggtcacgagtattagcgcagacctcaagatttaaacaacctgaaaatattgcaaaattattaaaacaaacaaaagcttggtttggcttattattcgcacaaaagaagacaagaaaggcacaaagctaa

SEQ ID NO: 157275 - protein, 1126 aa, Haemophilus influenzae R2866
MFIVYYSNQLEKQKEILSSLFKSLPPEDPFQQDIILVQSPNMAQWLQIELAKETGISANLKFPMPASFIWQLYAQNLPATALENPFDKDSMMWRLMRLIPIFLEKENFSPLRNYLSSSPHSEQYKLYQLSSKIADLFDQYLVYRPEWIFAWEKGEDEQITAQIQKQQPNLNATLFAQIQGNTKWQGELWRALVVDVKSDVGDATHRAALHNQFLALLADKKAPKKLPSRIFIFGIPALPTAYLNILQAISSEVDIHLFFNNPCQEYWGDISDLRLDYLRSRQRYQFNKQDEDQPLFSEDQLSQLENAQFDVTYQKENLQLGNPLLAAWGKMGRDFLYTLVRDEEHIPTYPVNAYQEIESNSLLGQLQSQILHLENKPLNIAKNDRTLTLHSCHSAMREVEVLHDYLLDLFNQDPSPTPKDVVVMVADINQYTPYIQAVFGQKNGDAPQIPFSLSDNKLSESDVLVSSYLTLLGLKESNFSAEDVLALLDIPAMRERFNISLADLPLVREWVTDSGIRFGLQKNQDGINFNSWQAGLERMILGYAMREEQGIWQDSLGLNSSYGLKGELAGNLSHFFTALSALHETLQQSHSIEKWQEILTALLSDFFVRNEDTSDMIFYIQEKINELAEHLKTIHFNEELQAEVIADVITMKLEDAPNSLKFLAGKVNFCTLLPMRSVPFKVVCLLGMNDADYPRTQTPNSFDLMQYHYQKGDRVRRDDDRYLFLEALLAARDYCYISYVGRSITDNQAKEPSVLVSQLLDYINQGQKENVLTVIEHPMTAFSPDNFKNNEKFTRSFATKWLPIAQFDTAASNSEFAVTMTENPEKIEEVEVDSLVSFVENPVKFFFEKQLGVYFRDKDERIADSENFTLSGLDNYSLNNDLIYLDEQNFADYFRQAEVKGVLPRAEFGKVYAENIRDNVLEFKEKIADLGEPKQASIDFNIAVDWQNENQKIRLFGYMDALFGDNSQVIHWHFAKYKDRYCIRPWIYYLIQCVTQENAVPAKLITQDKVLELPPIEREVALAQLQIYVKDYLQSQIEIQLVPTIRNINDFIVDDESAVDFDNVFEKLQALTESNGFGSKADPYWSRVLAQTSRFKQPENIAKLLKQTKAWFGLLFAQKKTRKAQS

SEQ ID NO: 157276 - DNA, 3354 bp, Synechococcus sp. RS9917
  CDS (1)..(3354): transl_table=11
ttgctgacggtctaccggagcaaccgggcggaatggctggcccggatcctggcggaacagctgaggctggcgccaccggcaccgttcgacgaggtggaggtgatggtcaacacctggcccaccagtcgctggctgggggagcaactcgcggccgtcaacggcatcagcgccctggtgcgattccccttcccaggctcccgcctgcgtcagctggttcgcagccttgatggcgacgcttcccaagccgacgccgacgatccctggcgggcggaggggctggtgtggcgcgtgctcgacgttcttccagacctgttggcagaagcggaggccgaaccgctgcgccaatggatggccctgcaccccagcggccccggtcaactgaaccgggaccgctggctgctcgcccgcagcctcgccgatgcgatcgacgattacgccctgtatcggcccgatgcgctggagcgttggctgcaccgcagcggcccggacccggacctgccgaccgccctgcagtggcaacccctgctggtgcaacagctggcccgacactgccccgtccccccctttggcctccaggtgcggcgtgcagtgcaacggctgcgcgccggtgcagcaccaaccgagtgcctgcccaggcagctgcgcctgttcggcatcagcagcatggcgccggtgcaggtagagctgttgcaggccctctcgggcgtgatcgacgtgcagttgtttctgctcaccccctgcccggatctctggcaacgctccgggcaacggcgacgccggctgggcgaccactggcaggcccccctggatgggtcctggttgctggaggcacctcggctggaggcgatggcaggtcgcatgggggcggaatttcagctgctgctcgaaggcagcggcgactgtcaattgggtgaacgcaccaacggggatctgtttgccgcgccgatgaccagcgccctcgaggcgaaccgacgtccctccctgctggaacaactgcaggagcagctggtggtgacacaggacaccgacctgcaccatcaggtcggagacgagtcactccgctttctggccagcccaggccgctggcgcgaggtgcaactggtgcgcgatcagatcctgcagtggctggcggcggacccaacgctccaaccccgggatgtgctggtgatgaccccgcagatcgatcacttcgcgccgctgctgagctcggtcttcaacgacgccgcggccaccggcgtcgccctgccctggcgcctcaccgaccgcagccagcaggacagtcccggcctctgccagagcgtgctccaacttctggagatggccggtgaacgcctgacggccacagggctcgagcaactgctcgccaacccggccctgcaggcggcgcaacaactggagcgcagcgaggtggaggcgatccatcgctgcctgcagcgcagcggcttccgctggggcctcgatgggcgcgaccggcgcggcgatcccacccacagcctgcgctggtgcctggatcgctggttgctcggcctggtgtttgatgacgccaccacggtgggcaacggtgacaccgccccgttcagtgatgggctgacaccggagcagctgggccgctggtggcccctgctcgatcgactcgcccgctggctcgaccgcctcggccagccgcgtcgctgcagcgactggatccccctgctgctcaccctgctggaggagctcttcggcgatggcggcgcctggagcgaggagaagcaagccgtgttggcggctctggagggctggcgggaacgggcggacacctgtgctctgctgctggaaccgagcgtggtggtggcggtgttgcgggaagcgctctcacgcgacagcggtcgcttcggtcatcgcagcggcgccgtgacgatcagcgccctggaaccgatgcgcgccatcccgcaccgggtgatcatcctgatggggctggatgccagcagttttccccggcagagcgagcgccccggtttccatctgctcgaacagcaacgccggctgggggatccctcccccagcgatcaggaccgctacgccctcctggaggccctgctctcagcgcgccaacatctgctgatcagctggaacgcccgcgacgagcgacggggggagacgttgccgcccgcggcgccggtgcagcagtggttgtcgctgcttgaagagcagctgggccccgccgccatgacggcattgcggcttcaacccgccgccaatccgctcgatccgaccaacttccaaccgcaggcaccgggtgttctggcgagctgtgatcaacgcttgctgctggcgcgccgctgcctcgatcaggccctcaggggtgagagaggttctggcgtgacagccagcgccagcgatgacctggtgggcctggcccaaccgctgcattggaccctcagcgacgccacggcagaggaggccaacggttcgctggatcacggtttgctggatcacagtttgctggatgcggagcggatcgaacgctggctggcggccccccaacgggtctggctggaggagcaaggcctcaggccccaggaatggctggagccgatcgaagacttcgaggccctcgacctggcggaacgggacaggcaggcgctgctgcaggagcgcctgcagcacctgattgatcagctgcccgaggctgagaacggtcgcggctggagcgagccggaaccaggcgactggctggaacgcagccggggccgaggctggcttcccccggctgctgctgccgcggtggagaccgatcgcctggagcagcgctggcaaagcctgcagagcgccctgctgcaggtcggatccgtgcggcggcaaggtgggcgcctggtcgccggcgacaccctggtggtcgcccagccagggcgcttgcgggcgcgaggggtgctccgcggctggtggcagcacctccaggcacaggcggcggctgagggccgcgacacggtgatgatcacccgcgacacgggcaagagcagcagcgacggatttgctgtggccctgcgctggcgagggttcgacccggatcgggccgcggcctacctccacactcttcaggcttgcgtgatggaaggttggcgccactgctggccggtgcctcccgagagtggcctggcgcgggctctgcagctgcacaaaggcgaagacaccgccaaccgggccttccgcagccagtggcaaggcgacttccaggccttccccgagcgggagcggccggagatgcgcctctgcttcggcgagggctgcgacagcgagcagctgctggaggcgccgggtttcgaggcggccttccaaggcttgtaccagcccctggtggagcacctggagcgatga

SEQ ID NO: 157277 - protein, 1117 aa, Synechococcus sp. RS9917
MLTVYRSNRAEWLARILAEQLRLAPPAPFDEVEVMVNTWPTSRWLGEQLAAVNGISALVRFPFPGSRLRQLVRSLDGDASQADADDPWRAEGLVWRVLDVLPDLLAEAEAEPLRQWMALHPSGPGQLNRDRWLLARSLADAIDDYALYRPDALERWLHRSGPDPDLPTALQWQPLLVQQLARHCPVPPFGLQVRRAVQRLRAGAAPTECLPRQLRLFGISSMAPVQVELLQALSGVIDVQLFLLTPCPDLWQRSGQRRRRLGDHWQAPLDGSWLLEAPRLEAMAGRMGAEFQLLLEGSGDCQLGERTNGDLFAAPMTSALEANRRPSLLEQLQEQLVVTQDTDLHHQVGDESLRFLASPGRWREVQLVRDQILQWLAADPTLQPRDVLVMTPQIDHFAPLLSSVFNDAAATGVALPWRLTDRSQQDSPGLCQSVLQLLEMAGERLTATGLEQLLANPALQAAQQLERSEVEAIHRCLQRSGFRWGLDGRDRRGDPTHSLRWCLDRWLLGLVFDDATTVGNGDTAPFSDGLTPEQLGRWWPLLDRLARWLDRLGQPRRCSDWIPLLLTLLEELFGDGGAWSEEKQAVLAALEGWRERADTCALLLEPSVVVAVLREALSRDSGRFGHRSGAVTISALEPMRAIPHRVIILMGLDASSFPRQSERPGFHLLEQQRRLGDPSPSDQDRYALLEALLSARQHLLISWNARDERRGETLPPAAPVQQWLSLLEEQLGPAAMTALRLQPAANPLDPTNFQPQAPGVLASCDQRLLLARRCLDQALRGERGSGVTASASDDLVGLAQPLHWTLSDATAEEANGSLDHGLLDHSLLDAERIERWLAAPQRVWLEEQGLRPQEWLEPIEDFEALDLAERDRQALLQERLQHLIDQLPEAENGRGWSEPEPGDWLERSRGRGWLPPAAAAAVETDRLEQRWQSLQSALLQVGSVRRQGGRLVAGDTLVVAQPGRLRARGVLRGWWQHLQAQAAAEGRDTVMITRDTGKSSSDGFAVALRWRGFDPDRAAAYLHTLQACVMEGWRHCWPVPPESGLARALQLHKGEDTANRAFRSQWQGDFQAFPERERPEMRLCFGEGCDSEQLLEAPGFEAAFQGLYQPLVEHLER

SEQ ID NO: 157278 - DNA, 3333 bp, Synechococcus sp. WH 5701
  CDS (1)..(3333): transl_table=11
atgctgacggtgtatcgcagcaaccgggccgacctgctcgcccagctgctgggacaacacctgcttctcgccccccccgaccccttcgagacggtatcggtggtggtgaacacctggcccaccagccgctggctgggggagcagctggccctggagctggggggcatcgccgccaacatccgcttcccctttccaggcagccagctgcgcgccatcgtcgagcagctccttggcgagagcaccgagggaagcgacccctggcgggcgggcgacctggtctggccggtgctggagctgctgccgcagctggtggaggcgccggaagccgcgccgctgcggcgctggctggagcaccgcgacgacgggggcgagctggatgcccccctctggcaactggcccgcgccatcgccgatggcctcgatgacctcagcctctacaggccagcgatggccctggcgtggtggcagggcggcagtggtgacagccgcgggaatgccctgccggagtcgctggcctggcagcccctgctggttcagcacttgcgggaccgcctgggtcagaagcccttcgggctcaaggccctggacctgatcgagcgcttgcgccaaggacagatcagcggcgaagcgatcgcctcccccttgcgcctgttcggcctcagcagcgccccgccggtgcaggtgcagctgctccaggccctggccctggtggtgcccgtggacctctacctgctcaccccctgcgccgacctctggcagcgctgcattgagcgccgccgcgaactccaggacgccctggccctggagcagcccttcggcctcgactggttgctgcagaccccgggtctcgaggcccgcttcggccgcctggggggggaattccagcagttgctggagggcaccggcgagtcggagctgggcagtgcacaggagcgggatctgttcctgttgccggccacggcggcggccgccgcccagcgcaaccccagcctgctggagcagctgcaggagcaactcgcccagcgggcggcagcctctcccctgaagcgctctggggaggaccactccctggagttccacccctgtccggggaggctgcggcaggtgcagatcgtgcgggatcgcctgctgcagctgctggcctcggaccccagcctcgagccgcgccacatcctggtgatgactccccaggtggaccagctggcgcccctgctggcgtcggtcttctccgacagcgacgccacgggagttgagctgccctggcggctcaccgaccgcagccagctcgatgacgccggcatcgcccagtcgttgctgcaggtgctgcggctggcgggagagcgcctgacggcctcgggcctggaaggcctgctcgagagcactgccctgcaggagcaccatcagctggagccccacgaggctgccgccatcaccagggcactgcaggccagtggcttccgctgggggctggacgggagcgagcgcggcggcgccgagcagcacagcctgagctgggcgatcgatcgactgttgctgggcctggtgctccccgaccagcccgggctggccatcggcgactgcgcgccccaccccctggccggcacgcctgagagccaggggcgctggatcctgctgctcactcgcctcaggcgggcgttggcggagctgcgccacagccgccgcgccgaggagtggggcccctgtctcaggggcctgctcgaggacctcttcggcgacggcggcgagagggcctgggagctgacaacgatccaccaggccatcgccgagtggacggccggggccgccggctgcaccctgacgatcccgccaacggtggtggcggcggtgctgcaggagcggctggccgccgacagcggccgcttcggccaccgcagcggcgccctgacgatcagcgccctcgagccgatgcgggccatcccctaccgggtgatcgtgctgatgggcctcgatgcggaagtgttcccacgccgccgacagcggcccagcttccatcccatggagcatcagcgcctgctgggggaccccgatccggccgaccaggaccgctatgtgctgctggaggcgctgctctcggcccgcgatcacctgctggtcagctggagcagccgggacgagcgcaagggcgatcccctcccaccgccggccccggtgcgccagtggctggatcagctgcgggccgacctcggtgccgagggcttcgagggtctggtggtggaccacgccgtcaacccgctcgatcgccgcaatttcctgccggcaggtcaccggccgccacccagctgcgaccagcgcctgcgccaggcccgccagcgcctcgaggatccggcgctggcggttcaaccacttcaacccctggcccggcgtcagccacccgagccagtcgctgcaaacggcaccagcgcgcctgagggggatcccaccactgatccctttgaagacctgcgccgctggctgatggcgccccaggacagctggctgcagcagctgggcctgcggccgcgggaatgggccgacccggtggaagaccttgaagccctcagcctcgatgagctgcggcgctcccagctgctgcgcgatcaactggcccgcggcagccatgaccctgacccgcccgactggctgcggctgtggcgcggccgcggcctggcccctcccctgacggcgggggagctggaaggcgacgccctcagccagcgctggtcatcgctgcaggaactcctggttcggctgggggaaccccgccgccagcggcagcggtggccggagcggcagggggcaccactgagcagggtcctggaggcggatcttgactggcgcgacgatctgctggtgctggtgcacaccgcccgggcccgcaccccccaccggctcgatctctggctgcggctgttgctggcgggtgccagcggccaggccccgcggcaggctctcctgatcgctcgcgacaaggatcgtttcgtggtggcgcagcggttgcaggccgtcggagcggaggccgcggccgaacagctgcagcagttgctcagctggcggcagagccatcgccaccactgctggccggtgcccccggaaaccggctgggcctatgcccaggctgagcacagccgccccggcgatggctccgccaaggcgttgcagagctgggagggggctcccccctggaccgacggcgaacggcaacaggaggcgatggccctctgcttcggccgagagtgtccggctgactccctcctccgaggcgatttcggagcgttctcctccctggccatggccctgcatgaaccgctgctggagcagcagctgaagccatga

SEQ ID NO: 157279 - protein, 1110 aa, Synechococcus sp. WH 5701
MLTVYRSNRADLLAQLLGQHLLLAPPDPFETVSVVVNTWPTSRWLGEQLALELGGIAANIRFPFPGSQLRAIVEQLLGESTEGSDPWRAGDLVWPVLELLPQLVEAPEAAPLRRWLEHRDDGGELDAPLWQLARAIADGLDDLSLYRPAMALAWWQGGSGDSRGNALPESLAWQPLLVQHLRDRLGQKPFGLKALDLIERLRQGQISGEAIASPLRLFGLSSAPPVQVQLLQALALVVPVDLYLLTPCADLWQRCIERRRELQDALALEQPFGLDWLLQTPGLEARFGRLGGEFQQLLEGTGESELGSAQERDLFLLPATAAAAAQRNPSLLEQLQEQLAQRAAASPLKRSGEDHSLEFHPCPGRLRQVQIVRDRLLQLLASDPSLEPRHILVMTPQVDQLAPLLASVFSDSDATGVELPWRLTDRSQLDDAGIAQSLLQVLRLAGERLTASGLEGLLESTALQEHHQLEPHEAAAITRALQASGFRWGLDGSERGGAEQHSLSWAIDRLLLGLVLPDQPGLAIGDCAPHPLAGTPESQGRWILLLTRLRRALAELRHSRRAEEWGPCLRGLLEDLFGDGGERAWELTTIHQAIAEWTAGAAGCTLTIPPTVVAAVLQERLAADSGRFGHRSGALTISALEPMRAIPYRVIVLMGLDAEVFPRRRQRPSFHPMEHQRLLGDPDPADQDRYVLLEALLSARDHLLVSWSSRDERKGDPLPPPAPVRQWLDQLRADLGAEGFEGLVVDHAVNPLDRRNFLPAGHRPPPSCDQRLRQARQRLEDPALAVQPLQPLARRQPPEPVAANGTSAPEGDPTTDPFEDLRRWLMAPQDSWLQQLGLRPREWADPVEDLEALSLDELRRSQLLRDQLARGSHDPDPPDWLRLWRGRGLAPPLTAGELEGDALSQRWSSLQELLVRLGEPRRQRQRWPERQGAPLSRVLEADLDWRDDLLVLVHTARARTPHRLDLWLRLLLAGASGQAPRQALLIARDKDRFVVAQRLQAVGAEAAAEQLQQLLSWRQSHRHHCWPVPPETGWAYAQAEHSRPGDGSAKALQSWEGAPPWTDGERQQEAMALCFGRECPADSLLRGDFGAFSSLAMALHEPLLEQQLKP

SEQ ID NO: 157280 - DNA, 3318 bp, Synechococcus sp. WH 7805
  CDS (1)..(3318): transl_table=11
ttgctgaggatctaccgcagcaacagagcggagcttctggctcagctcctcgcccaggatctcaatctcaaccctcccaacccgtttgaacaggtcgaggtggtggtcaatacctggcctaccagccgttggctgggggaacgactggccagcatcaacggaatcagcgctcttgtgcgcttccctttccccgggagccgcctgcgccaactggtgcaagcggtgctgagcacggagccccccattgatgatccctggcgagccgaacggttggtctggacggtgctcgctgtgctgccgcaactgatgcagcgcaaggaggctgaaccgctcaggcagtggtggaacagtcaccgcacagcatccgagactctgacgcgggagcagtggttgctcgcccgccaactggcggatgcggtggacgattacgcgctttacagacctcaggaactggctaactggctggctggagatgacggggggaacctcccgggcgtgctgcgctggcagccccttctcgtgcgtgcgctcgctgaccggcttccgagcgatcccttcggcttacaggttcaacgggccgttgatcacctccgcttggggcaagcaccggccacaacgctgccgaggcgcctgaggctgttcggtctcagcaacctcgccccggtgcagattgatttgcttcaggcgctggccggagtgatgcaggtggagctttatttgctcacaccatgcccggatctatgggagcgatcagcgcgaagacggcgccgactgggcgagaactggaccgcatccccagatggaacctggctgatcgaggccccgaaactggaagccatcctcggtcgcatgggaggggaattccagctgctgctggagggcagtggtgactgcctgctcagcagcacggaccaggctgatctgtttgccgacccggtggcgatggcagcctccgaaggccggcaggcgtcgttgctggagcaactacaacgacagctcgcaagccccgagcacgcttcgttacagctcaagcgttcggatcaatccctgctgttcatgggctgcgcaggcccctggagggaggtgcagctggtgcgggatcgcattcttcgctggatggccgacgatcccacgcttcaaccacgggacatcctcgtgatgacgcctgatgttgagcgttatgccccgctgctggcctcagtgctctctgaccaggacgccaccggagtggatctgccctggcgcctcaccgaccgcagtcagcagaacagccctggattgcagcaggccttcatgaccctgcttcagctcagtgcggagcgtctcaccgccacaggactggaagcactgatgagcaatccggcctttctcagtcttcagggtctcgtagcccaggaggcgatggacatcaccgcggctttgcaacgcagcggcttccgttggggactcgatcgtgaggaacgccatggcgatgacacccacagcctgcgctggtgtcttgatcgctggctcatcggcctgatcctccccgatgagcctggcctagcacttggcacctgtgctcccgccctcccagatctgagccttcagcagctcgagcgctggtggccgctcttggatcaggttgcacgatggatcgctcagttgcgccaaagcggaagctgctcggcgtgggtggaacgcttgcggcggctgctctccgatctcttcggcgacggtggtgcctgggactgggaactgcaagcaatccagcaatgcctggactgctgggtgctacaggctggccactgcgaactcaacctggaaaccactgtggtgatctcggttctcgaggaagcactttcggccgacagtggccgcttcgggcaccgcagcggtgccatgaccgtgagcgccctcgaaccaatgcgtgccattccccatcgggtcatcgtgctcatggggctggatgccgcctcctttcctcgtacacgggaacgcccgggatttcatctgctggagcggcagcggaggcttggggatccaagcagtacggatcaggatcgctacgtgctactcgaggcgctgctctcctcccgtcagcacctgttgatcagctggagcagccgtgatgaacgacgcggagacaccctgccaccctgtccgcccgtgcagcagtggctcagcctgctgcgacaggagctcagcgaggaggcgatggctcaggtgttgatcgaaccaccggccaaccctctggacgcagccaacttcatccctgccaaaactgacgcgttgagctgtgatcgtcgcctgcttcaggccaggcagtgcctcgatgatccgcaacgcccggccccaggccatgcccccctcggtctcgccctgcccattcactggaccctggaagcgaaacccgcggcagcgcaggccaacactctgaacagcgaccaagtggaacagctggaacgctggctgcaagctccccaacgggcctggctccggcagcggggcatcgaagctggggagtggtgtgatgccgttgaagatcgatcaccgctggccctacccgaacgcgcccttcgcgccttgatgacagagcgcctgcatgatgaactcgatgggctcacgagagaccctgaggcccggtgggacacctccaagtccggagactggttgcaatggagctgcggccgagggctgctaccgcccggggctggggcggcgctggacgacagccgcctggaacagcgctggcaaaacctacaaaccgccctgttcagcctcggaaccctgcagcagcctccgcgatggcagaagctcgcgattccgccactgccagtggcgggagaaaccgctgtgatgatcagcacctccaagcttcaggcccgcaccgtgctggagggctggttcaaacaccttctcaaccagcgggagggccgaggctctccgaccgtggtgatttgccgcggtgatagcagcagcaaagccgagacgttctccgtcgccatgcgctggatgccgatggagccgcagcaggctgatggattgctcagcgacctgtttgcactggctgatgaggggctccggatctgctggccgatccccccggaaagcggactggccagggcgatcaccctggccaaagggagagacgttgccgaccgcgccttcagcacctgctggcatggcgggatcaagcgttgggccgaacgggatcgaggtgatctccaggcctgtttcggtgacggttgtgatgcggactatctcctcaacagccccgggttcgacagcgccttcgacagcctgtatgccccgcttctcgaggccagaagccaatga

SEQ ID NO: 157281 - protein, 1105 aa, Synechococcus sp. WH 7805
MLRIYRSNRAELLAQLLAQDLNLNPPNPFEQVEVVVNTWPTSRWLGERLASINGISALVRFPFPGSRLRQLVQAVLSTEPPIDDPWRAERLVWTVLAVLPQLMQRKEAEPLRQWWNSHRTASETLTREQWLLARQLADAVDDYALYRPQELANWLAGDDGGNLPGVLRWQPLLVRALADRLPSDPFGLQVQRAVDHLRLGQAPATTLPRRLRLFGLSNLAPVQIDLLQALAGVMQVELYLLTPCPDLWERSARRRRRLGENWTASPDGTWLIEAPKLEAILGRMGGEFQLLLEGSGDCLLSSTDQADLFADPVAMAASEGRQASLLEQLQRQLASPEHASLQLKRSDQSLLFMGCAGPWREVQLVRDRILRWMADDPTLQPRDILVMTPDVERYAPLLASVLSDQDATGVDLPWRLTDRSQQNSPGLQQAFMTLLQLSAERLTATGLEALMSNPAFLSLQGLVAQEAMDITAALQRSGFRWGLDREERHGDDTHSLRWCLDRWLIGLILPDEPGLALGTCAPALPDLSLQQLERWWPLLDQVARWIAQLRQSGSCSAWVERLRRLLSDLFGDGGAWDWELQAIQQCLDCWVLQAGHCELNLETTVVISVLEEALSADSGRFGHRSGAMTVSALEPMRAIPHRVIVLMGLDAASFPRTRERPGFHLLERQRRLGDPSSTDQDRYVLLEALLSSRQHLLISWSSRDERRGDTLPPCPPVQQWLSLLRQELSEEAMAQVLIEPPANPLDAANFIPAKTDALSCDRRLLQARQCLDDPQRPAPGHAPLGLALPIHWTLEAKPAAAQANTLNSDQVEQLERWLQAPQRAWLRQRGIEAGEWCDAVEDRSPLALPERALRALMTERLHDELDGLTRDPEARWDTSKSGDWLQWSCGRGLLPPGAGAALDDSRLEQRWQNLQTALFSLGTLQQPPRWQKLAIPPLPVAGETAVMISTSKLQARTVLEGWFKHLLNQREGRGSPTVVICRGDSSSKAETFSVAMRWMPMEPQQADGLLSDLFALADEGLRICWPIPPESGLARAITLAKGRDVADRAFSTCWHGGIKRWAERDRGDLQACFGDGCDADYLLNSPGFDSAFDSLYAPLLEARSQ

SEQ ID NO: 157282 - DNA, 3252 bp, Pseudoalteromonas tunicata D2
  CDS (1)..(3252): transl_table=11
atgctgcatattattcaatcaaatcgtctcgaagtactgcaacagcaattacaccttaagctcctgcaatacccgcttaatagtttgtttaaaaaagaaattatattagtgcaatcaccgggtatgtcgcagtggttaaaaatggggctggcccacgcacagggcatagtggcacaagttgatttcccgttaccgtcgagttttacgtggcgcttatatcaaagtttattacctgatgtgcccgccgaatcagcatttaataaagcaaacttaacctggaagctgtttgctattttaccaacgtgtttaaacgaaccactctttttaccgctagagcgctatttaagtgatgataacgcagggcaaaaactcttttcgttatgcgaaaaaatcgccgatgtgtacgaccaatacctgatgtatcgccccacgtggctggcaacatggcaaaccggcaaagatactttacctgatgtcgatattagccatgccccttggcaaccagagctgtggcgtaaattggtggcttacagccaatccttagggcaaagccaatatcatcgcgctaacatgcaagatgccttacttgaggctttagctaatgccccccttaatttgttacctgagcggatcagcatttttggcatttcagccttagccaattctcaattggtggtattacatgctttagcagaacggatccctgtgtatttatacttttttaatccgagcgagcattattggggcgatgtggttgatgaaaaaaccttagctaaaatcaatgcaaaatatcaaataaaacccaatttagccgcccaagagcaagactactattttgttggcaacccgctgctatcgtcatggggtaaacttggccgtgattattttgagcaattgatacaactcaacgcccagtggcacgattattttgttgaaccagaacctgacaatttactgagcgccatgcaatctgaaatatatcatttggcatttaaagggcagagtttgcccgatgatcccacttggtatgtgactgaccaaggtaaaatagccgtcaacccccaagattgcagcattcagtttgccaattgccataccgcattgcgtgaggttgaagccctgcacgatcatttactcgatttgtttagccaagacccaagcctcacgcccaaagacataatcgtcatgatgcccgatgtcggcagttacagcccttatattgaagctgtatttggtgccgcaagtgccgaacgttatattccgtatgccttagccgatttagccattgcacaagaaaaaccaatattaagtagttttaatcaattggtgaatttaccttttagccgctttggtgtctcagaaatactcgatttactgcaagttgattgtattgcacgccactttaatattagccataacgatttagatcaaattcgcttttggcttgaacaagtgggggtgaaatggggtttaaatgccagtcataaagcccagttagcgcaacctcaattagccctaaatacttggcaacatggccttgaacgcttattgcttggagtggtgcaacgtgatgaaaataatgcatttagtggtatttatgctgccgatgaagtggaaggcatggcggctgcattacttgggcatttattagcatttgtgaatcgattagcccattacaaaaccattttagaacccgatgcaacgcttgcagtcaaagcccagctcttgcatcaattagtgcaggatttttatgatcattctgacgagcaagcgtgggatttactgacgctcgatagcttaattcaaaaccttggcaaacattatgataataaagattaccaaggcgaggttagcgcacgcattatcagtgcgttagtacaacaaggactaagcgaaaatggcgtaggtcagcggtttttagttggccaagttaatttttgcaccttaatgccgatgcgggctgtgccgtttaaagtggtgtgcatgttaggtttaaacgatgccgattatccgcgcagtgtgcaaccaatgggatttgatttattgccccacagcaagcgacaaaaaggcgaccgttctcgtaaattagacgaccgttacttgtttttagaagccatgttgagcgtacgccatcatttatacatcagttatattggccgttcgtgttttgataactcagagcgggtgccatcggtattagtcagtgaattgcttgagtatttagggcgcagcttttatcagccaaattgcgctgatttcccaaataatctgattaaaaaacaccatcttcagccttttaacccagattattatcaacccggtgcgccacaaagttaccatcctacgtggcaaataaaaccgctgcagttaaatcaagacaaagcagcgctgccattattgccagcagctgaaattgaattaaacagttttattcgcaccgtgtgccaagcacaagaaagtttttatcgtaatagcttaggcttaaagttgacgcaatttgacgaaatagccaaagatgaggagcctttctcattagatcatcttgaacgttatttttatttagatgaaatgctggtggctgcgcttaaaggcacaaccattaatcaagcacaaattttgcaacgtggtgatttacctctggcgcatgtaggtgaaattacccttgagcagatgcaacagcgcattggtcaaatggtcaacagccttcacagtcatgatgtcactgagtttaatgagccgatagaaattaatgtgcaactggggcaaagtcagttagtgggttggttgactcaagtaaccggcaaaaaacaagtgttttaccgcactgcaactatcaaagcaaaagacatgatcaaagcttatttatatcatttagtggggtcattgggcgctcatattacagaaacttgggtcgtggggcttgatgggcaatatcagtttaaagtacaaagcgcccaagatgctaaaagccaattagataattggtttcgtttgtatcaagctagtttgcaacagccggtggcgttttttccgaccgctgcgtggcagtttgctacaacaggggattttgctaaagcagcacaaaagtttgcaggtggcgaatacattggtcgtggcgaagccgaaaacccctatgtcgcacttgattttaaacgtttagagccgcacgaagctgagtttatccgctggagtgaattattagtctcacccattgcggcacacgccgtggaggtcaaacatgcaggggcttaa

SEQ ID NO: 157283 - protein, 1083 aa, Pseudoalteromonas tunicata D2
MLHIIQSNRLEVLQQQLHLKLLQYPLNSLFKKEIILVQSPGMSQWLKMGLAHAQGIVAQVDFPLPSSFTWRLYQSLLPDVPAESAFNKANLTWKLFAILPTCLNEPLFLPLERYLSDDNAGQKLFSLCEKIADVYDQYLMYRPTWLATWQTGKDTLPDVDISHAPWQPELWRKLVAYSQSLGQSQYHRANMQDALLEALANAPLNLLPERISIFGISALANSQLVVLHALAERIPVYLYFFNPSEHYWGDVVDEKTLAKINAKYQIKPNLAAQEQDYYFVGNPLLSSWGKLGRDYFEQLIQLNAQWHDYFVEPEPDNLLSAMQSEIYHLAFKGQSLPDDPTWYVTDQGKIAVNPQDCSIQFANCHTALREVEALHDHLLDLFSQDPSLTPKDIIVMMPDVGSYSPYIEAVFGAASAERYIPYALADLAIAQEKPILSSFNQLVNLPFSRFGVSEILDLLQVDCIARHFNISHNDLDQIRFWLEQVGVKWGLNASHKAQLAQPQLALNTWQHGLERLLLGVVQRDENNAFSGIYAADEVEGMAAALLGHLLAFVNRLAHYKTILEPDATLAVKAQLLHQLVQDFYDHSDEQAWDLLTLDSLIQNLGKHYDNKDYQGEVSARIISALVQQGLSENGVGQRFLVGQVNFCTLMPMRAVPFKVVCMLGLNDADYPRSVQPMGFDLLPHSKRQKGDRSRKLDDRYLFLEAMLSVRHHLYISYIGRSCFDNSERVPSVLVSELLEYLGRSFYQPNCADFPNNLIKKHHLQPFNPDYYQPGAPQSYHPTWQIKPLQLNQDKAALPLLPAAEIELNSFIRTVCQAQESFYRNSLGLKLTQFDEIAKDEEPFSLDHLERYFYLDEMLVAALKGTTINQAQILQRGDLPLAHVGEITLEQMQQRIGQMVNSLHSHDVTEFNEPIEINVQLGQSQLVGWLTQVTGKKQVFYRTATIKAKDMIKAYLYHLVGSLGAHITETWVVGLDGQYQFKVQSAQDAKSQLDNWFRLYQASLQQPVAFFPTAAWQFATTGDFAKAAQKFAGGEYIGRGEAENPYVALDFKRLEPHEAEFIRWSELLVSPIAAHAVEVKHAGA

SEQ ID NO: 157284 - DNA, 3462 bp, Photobacterium sp. SKA34
  CDS (1)..(3462): transl_table=11
atgtttaccgtctaccattcaaatcaactcgacttgcttaaatctttgttagtggaacttattaagctacagccattagccaatccatttgaaaaagaacagattctggtacaaagcccagggatgtcgcaatggttaaaaatggagctagcaaagtcattaggtgtggctgctaatattgattttccactgccagcgacctttatttggaagatgtttacgcaggtcctcgctgatgtgccagagcgcagtgcatttaacaaagaagcgatgaagtggaagttaatgcaagtgctaccagcacagtttgagcaaccggagtttgaagcactacagcgttatttagacggtgatgacgacaatttaaagtgctatcaattagcggaaaaaattgccgatatttttgaccaatatctagtgtatcgccctgagtggatccaacaatgggaagcgggggaaacggtcgttgaattagaagatgagcatccttggcagcctattttatggcaagcactgtatgatcaaaccttggcacttgggcaatcgccttatcatcgtgccaacttgtacgaacactttattgaaacgctacaaaactacaacgcatcacaaggtaaagaagcattaattgcagcaggtttaccgcagcgtttgtttgtgtttggtatctcatcattacccccacgttatctagatgcacttgctgctattggtgagcatattgatgtgcatttaatgtttactaacccttgtcgttattactggggagatattcgcgatcgtaaacaccttgcacgattagctgccagtaagcgggtcaaacttcataacatcgaagaacaacaagatattgatgccacgattgaagtactaaaagacaacgatgaaagccactatgatgatgaaatgcaaaacggcatggtgggcaatagcttattagcctctatgggtaagcttggtcgcgataacatgtatttgttatcagagatgcaagttaatgaagtggatgcaggtttcgttgatattgaatcagataccttattacatgccattcaagcagatatcttaaacttggttgatcgccaagatgatacccaattagattccagtgagcataagtttccgattatctctgatgatcaatcgctctctattcatgcatgtcatagcccaatgcgtgaagttgaagtgcttcacgacaagctgttagcgatgtttgaagcaagccctaatctgaaaccacgcgatgtgattgtgatggtggcagacatcaatgtctacagtcctgccatccaagcggtatttggtaatgcgccgggcaatcgttatatcccattctccatttctgaccgaaccgcagagcaagaaaacccgatcttgttggcgtttttacgcctgttaactttgcctgatagtcgctgtcatgcttcagaactgttagagctattagaagtgccagcggtgatgaataagtttggttttgatagccaaagctttgagaaagtaaaacagtggatcgaagaagcgggagttcgctggggtttagatcagcatacatctagccaatttaatcttcctgagcagatgcaaaacacttggctgtttggtattcagcgcatgctgttaggttatgctatgccccataatactggtttgtttgaaggcatttctgcttacgatcaagtacagggtattgatgcggagttagctgggcagttagctggctttattgattgcttaattagttaccgtgaagtgttagcacagccacatttggtgacagagtgggcggatacacttaaccaaatgctggatgattttttcgccgtggaattggaaggtgaactggttcttaaatctattcgcgataacttacaccgcttgcacgaacaactcgatgatgcgggttataaaggtgagatcacaccagcagtgctaactcaatatttacgcgataagttatcgggtgagcgagtaagccaacgcttccttgctggacaagtgaatttttgtaccttaatgccaatgcgttctatcccctttgatgtggtgtgcttgcttggcatgaatgatggcgcttaccctcgaaatattgctcctgaagggtttgatttaatgaatggtcgcacaaaagcgggtgatcgttctcgtcgtgatgatgatcgttaccttttccttgaagcattattatcagcgcaagaaaccttatatatcagctatgtgggtcgctcaattcaagacaacgcagaaaaaattgcgtctgtgctggtcagtgagctggtggaatattgtcagcaaggttattgcttagggggggatgagtctctccctgtcgatcaatcagcagaaaacattaaacgaaaattgattgagcaccatcctttagtgccgtttagtccgagtgcatttactggcgagaaaggcagttatgccgtggaatggctacccgctgctgctcgtgaagggcaagcgagccaacctttccaattaggtgaactccctccagagccgattgccgatgatcaacaacaagtattagagcttgctgagttgcagcgtttctggcgcttacctgtgcgctatttctttaaccgtcgtttgaaagtctactttgagccgccaatgggattattggaagatgatgaaccgtttgtgctaaatcatcttgaaagttatcacgttaaagacgagctcttagtattattgcttgatgctcaaatgaccaataaagatccggatcagatatttagtcatttcgcccaagagcaaaaagcagcgggcaagttacctgttgcagcatttggtgatattgatttagatgccagtcgtctagcggtacgtgagttagtgaaccagattgagccattaattcatgcgccattagatgatcaagaagtggcaataacactaacgattaatggtcatgctgtattacttcaaggttggctgaaacagcgctatcaatccggcttaatgcgttttcgtagtggtaaagtgcgcgccgttgatttactagcggcgtggtgcgatcacttatgtttagcgattagccagccagaattgaatcagaaaacacatattattggtaccgataaacatcttgtcattgatgcgatcgaagcgagtaaagcacaaggttatttacaagagcttatcgaattatattaccaaggtttaaatcaacctttagcgtattttccgaaaacggcacacgcaggtattcaagcgtgtgtagataggcaaggtaactggaaagatgatgaacaaaccatcgagaaagcctacagcaaaatggcagattgttttaacgatggctacttctttgcaggtgaaggtgcggatgaatacatcaatcgggtatggacagattggaatgatgaacttgcacagaatagttatgtgttggcactgaaagtactacaggctgcggtattaaatagtgaagaagtaaagccggaataa

SEQ ID NO: 157285 - protein, 1153 aa, Photobacterium sp. SKA34
MFTVYHSNQLDLLKSLLVELIKLQPLANPFEKEQILVQSPGMSQWLKMELAKSLGVAANIDFPLPATFIWKMFTQVLADVPERSAFNKEAMKWKLMQVLPAQFEQPEFEALQRYLDGDDDNLKCYQLAEKIADIFDQYLVYRPEWIQQWEAGETVVELEDEHPWQPILWQALYDQTLALGQSPYHRANLYEHFIETLQNYNASQGKEALIAAGLPQRLFVFGISSLPPRYLDALAAIGEHIDVHLMFTNPCRYYWGDIRDRKHLARLAASKRVKLHNIEEQQDIDATIEVLKDNDESHYDDEMQNGMVGNSLLASMGKLGRDNMYLLSEMQVNEVDAGFVDIESDTLLHAIQADILNLVDRQDDTQLDSSEHKFPIISDDQSLSIHACHSPMREVEVLHDKLLAMFEASPNLKPRDVIVMVADINVYSPAIQAVFGNAPGNRYIPFSISDRTAEQENPILLAFLRLLTLPDSRCHASELLELLEVPAVMNKFGFDSQSFEKVKQWIEEAGVRWGLDQHTSSQFNLPEQMQNTWLFGIQRMLLGYAMPHNTGLFEGISAYDQVQGIDAELAGQLAGFIDCLISYREVLAQPHLVTEWADTLNQMLDDFFAVELEGELVLKSIRDNLHRLHEQLDDAGYKGEITPAVLTQYLRDKLSGERVSQRFLAGQVNFCTLMPMRSIPFDVVCLLGMNDGAYPRNIAPEGFDLMNGRTKAGDRSRRDDDRYLFLEALLSAQETLYISYVGRSIQDNAEKIASVLVSELVEYCQQGYCLGGDESLPVDQSAENIKRKLIEHHPLVPFSPSAFTGEKGSYAVEWLPAAAREGQASQPFQLGELPPEPIADDQQQVLELAELQRFWRLPVRYFFNRRLKVYFEPPMGLLEDDEPFVLNHLESYHVKDELLVLLLDAQMTNKDPDQIFSHFAQEQKAAGKLPVAAFGDIDLDASRLAVRELVNQIEPLIHAPLDDQEVAITLTINGHAVLLQGWLKQRYQSGLMRFRSGKVRAVDLLAAWCDHLCLAISQPELNQKTHIIGTDKHLVIDAIEASKAQGYLQELIELYYQGLNQPLAYFPKTAHAGIQACVDRQGNWKDDEQTIEKAYSKMADCFNDGYFFAGEGADEYINRVWTDWNDELAQNSYVLALKVLQAAVLNSEEVKPE

SEQ ID NO: 157286 - DNA, 3279 bp, Oceanospirillum sp. MED92
  CDS (1)..(3279): transl_table=11
atgtttcaggtatatcattcaaactctctattggtgctgaaggacctgcttactgaactgatacgcagagatccgatttcagatccttttgttgcagaacagattcttgttcagagtccgggaatggctcagtggctgaaacttgagcttgcagataagtcgggcatagccgcttcgattgattttcctcttcctgcctcttttctttggaagcatttttctgaggttcttcctgatgtacccgagcggtcggcatataacaaagaggcgatgagttggaagttgatggctgtgctaccggctatgctaaagcaacctgttttttccgctttacaacaataccttgccgacgatgatgatcgattccgcctgtatcagttgtgcaacaaaattgccgatatttacgatcagtatctggtttatcgcccagactggatagaggactgggagcagggtggagatatagccgctgcacgccacccctggcagcccgtgttgtggagggagttgaagtcttatacggaagaccttcagcaatctcattggcatcgtgcaaatatgttcagtgcctttgttgatggactcaaaaatccatcggcggcagagaagttacctcgtcgtctttttgtctttggaatctcagcattgccgcaaaactatgtccatgcgcttcaggcattggggaagcgtatcgatgtccacctaatggtgatgaacccttgccgctactattggggggatatacttgatcagtcgcagattgcccggctcaatcggcgttggtttagtaaaccggatctggatttttcagattatgcagaaggcaacccgctgttggcttcaatgggtaaattaggtcgtgactatctgtaccagttgcaagacaacgctctggatgagatagatgcctacgctgatcctgaacgcggctctctgttgagtgcgatccaacaggatattctggatctggaaaacccgacccgcttgcctgaacagatagataatagtcacggcaagcatcggcttgatcgtgaagatcgttccatcgagctgcatagctgtcatagtgcgcttcgtgagatcgaagtgcttcatgatcagttgctggacatgttcgagaagaatccactcttaaaaccgcgcgatgtgattgtcatgatgccagatgtggctgcttatgcaccctacattgaggcagtctttgcaaatgccccagcagagcggtacataccctattcaatttctgaccgaagcaatcgtcaggaaaacccattattgctcagttttgaaaagatcctcaaacttaatagctcccgttttacggtatcagatgttttagagttgttagaggtacccgcggtgatgcgccgggtgggtctggatgaaaaaagttttcagaaactacgcttctgggtagatcaggtaaatatccgctgggggatggattctgagcaacgttctatatgggaactgcctctttttgagcaaaatagctggcgctttggtattaagcgtatgctggtgggttacgcactgggggaagggagtgaatattggcaaggtgtagctccctataccgagatagaaggacttgaatctgagctgttagggaaattagccggttttatagatctgctcgatgaaacaaggcttcactttactcaggatcatgaattcagtacctggatcgaagtgattaaccagattctggaaaattattttactgcggatgagcaggatgagattagcctgaatactatccgtaaaactttgcagggccttcaggaacagttgaaagatgccaattactcccaggccttgtcgccttccgttattgcccattacctgatcgatggaatcaatcagcaacgctcaagccagcgttttatggtcggttcggttaacttttgtaccttaatgccaatgcgttcaattccattcagcgttgtctgcctattaggaatgaatgatggtacgtacccacgatcgattccgcctgtaggattcgatttgatgacagattatccacggcgtggtgatcgttctcgacgagatgatgaccgctacctgtttatggaggcactgttatcagcgcaagaaaagctttatatcagttacatcggccgctcgatcagagataacaatgaaaagattccttctgtactggtcagtgaactgcttgattatgctgagcaggggtatgtactggagggggatgaggagctaagttgtagtaacagtggtgaaaaattacgtgcgcacataaaaactcaacaccctttggtggcttttagtcctgaatattttaagtctgccggggactacttcagttttgcttcagagtggttgcctgctgcccaggcggaaagtcgtgccgctgaggtgtttttaaccgaagaccttacctcagaagcgcttccagagttagaactaaagcaattaataagctttctgcgcgacccctgccgcagcttctttaataaccgtttaaaggtttatttcggtaactcagagatagaggctcaggatgaagaacccttttctctcgacaacctctcttcatacctgctgaaacaacgctacttgcaatctgctctacaagacagggatctggaacgcctggataaggcgattctagctgaaggccgccttccattagcgcgagcgggtgaacttaacttgaacaagctacgccatgattctctggagttggcagagaagctaaaacccttatctgagggtactccacagaggatagagattaatctcagcataggtgaagttaagcttcaggggtggttggatagctgctatccggatcacttgttgcgttatcgtccggcccaggtgaacgcgcgcgaccgtctttctacttgggtagaacatctggcgttgtgcgcaagcaatcaagcctgtcggaatacggtctaccgaggcttgtcgggtaaagttttttataaagccgtgcccgctgagaaagcgaccgaactattagcggatctgattcgcttttatcaacaggggcaaacggcgccacaagcatttgatgctggatcggcgcataagtactttgaacagcaggctaaagatccggacaaagtgatgtcggcattggaaaaccagttctacggatctgcttacagcaatggattgcaagataatccttacctacgtagagctttctctgactttgagccatttgtaactcagtttataccgctggcggaacggatctacgagcctttattgagctgtgttgaggagggcaaagatgactaa

SEQ ID NO: 157287 - protein, 1092 aa, Oceanospirillum sp. MED92
MFQVYHSNSLLVLKDLLTELIRRDPISDPFVAEQILVQSPGMAQWLKLELADKSGIAASIDFPLPASFLWKHFSEVLPDVPERSAYNKEAMSWKLMAVLPAMLKQPVFSALQQYLADDDDRFRLYQLCNKIADIYDQYLVYRPDWIEDWEQGGDIAAARHPWQPVLWRELKSYTEDLQQSHWHRANMFSAFVDGLKNPSAAEKLPRRLFVFGISALPQNYVHALQALGKRIDVHLMVMNPCRYYWGDILDQSQIARLNRRWFSKPDLDFSDYAEGNPLLASMGKLGRDYLYQLQDNALDEIDAYADPERGSLLSAIQQDILDLENPTRLPEQIDNSHGKHRLDREDRSIELHSCHSALREIEVLHDQLLDMFEKNPLLKPRDVIVMMPDVAAYAPYIEAVFANAPAERYIPYSISDRSNRQENPLLLSFEKILKLNSSRFTVSDVLELLEVPAVMRRVGLDEKSFQKLRFWVDQVNIRWGMDSEQRSIWELPLFEQNSWRFGIKRMLVGYALGEGSEYWQGVAPYTEIEGLESELLGKLAGFIDLLDETRLHFTQDHEFSTWIEVINQILENYFTADEQDEISLNTIRKTLQGLQEQLKDANYSQALSPSVIAHYLIDGINQQRSSQRFMVGSVNFCTLMPMRSIPFSVVCLLGMNDGTYPRSIPPVGFDLMTDYPRRGDRSRRDDDRYLFMEALLSAQEKLYISYIGRSIRDNNEKIPSVLVSELLDYAEQGYVLEGDEELSCSNSGEKLRAHIKTQHPLVAFSPEYFKSAGDYFSFASEWLPAAQAESRAAEVFLTEDLTSEALPELELKQLISFLRDPCRSFFNNRLKVYFGNSEIEAQDEEPFSLDNLSSYLLKQRYLQSALQDRDLERLDKAILAEGRLPLARAGELNLNKLRHDSLELAEKLKPLSEGTPQRIEINLSIGEVKLQGWLDSCYPDHLLRYRPAQVNARDRLSTWVEHLALCASNQACRNTVYRGLSGKVFYKAVPAEKATELLADLIRFYQQGQTAPQAFDAGSAHKYFEQQAKDPDKVMSALENQFYGSAYSNGLQDNPYLRRAFSDFEPFVTQFIPLAERIYEPLLSCVEEGKDD

SEQ ID NO: 157288 - DNA, 3468 bp, delta proteobacterium MLMS-1
  CDS (1)..(3468): transl_table=11
atgaaccagcgacgcctgctactttaccgcagtaaccggattgaagagttgctggcctgcctggaggcggaactggcggttgccagcagcgccggcagcagcgccggcagcagcgccggcagcagcgcccccctgactgccgaatgtattgtggtccagagccagggcatggccgtctggctggagcagcggctggccgagcgtttcggtatctgggccaatcccgatttcccccatccccgccgtttccaccagcgtctgttgcaggccgttctgggccggcaggccgttgccgattttagccaccgggagagttttaccctggcgctgctggccttgctgcccaagttgccgcagcggcccgaatttgccccgctggcgcgctatctggatggggccgacgattggaaatgcctgcaactggcggagaaaatcgcctatcttttcgaccagtacgcggtttaccggccggagatggtgctggcctgggagcggggagaggagcaggccgggacggccggcgcggagttggccgataatcgctggcagcctttgctctggcggcggctgagccggcaactgggctcaccggtggcgccgctgacggaggcctttgcctctttgcgccaggggcggctggcggcccccgaactgttgccgccccgggcctttctttttgccatcaccaccctgccgccgctttatctcaacctgcttgaccaggcggcccggattatccccatccacctgctgttgttcagcccggcccgggaatactgggccgatattttcacccccgccgccttaagggaaatggagttgcgccatagtgatgccgcgctgcttgaggaaggcgagccggcggccctgcatttaagtggtggtcatcccctgttggcctcgttgggtacggtggcccgggagtttcaggatattttagaggagcagagcgattaccagccggccaccgacggtgaacgatttccggagaatcaagaaaaccccggcctgctggctcgcctgcaacaggatatcgcccagcttaaggagccggcggcgggggagggggaggagtcgcaaccgccgaccgccgatgactcactggccatccatatctgccacagccccctgcgcgaagtggaagttctccaggatcaactgctgcaactgttggatggcgaggagttcagcccccacgatattgtggtgatggtaccggatatcgagacctacgcgccgctgatcgaagcggtctttaaccgtccccccggagatcgtcgtcggattccctaccggattgccgatcgccgcttgagccgggaaggggagttgctcgacaccctgttgcggttttttgaagtggcccggggccggctggaggtttcggcggtgctggatttactggcggcggaaccggtgcggcggggtctgggcctggatggcgggcagttgcagcggattgagcaatggctgcgccagagccgggtctgttgggggatggatgaagaacaccgtcagcatcatgggcagccggcccagcggctgaacacctggcgttttgggcttgaccggctgctgttgggttacgccatgccggcggccagcgacgtctttgccgatattttaccccatgccgatattgaaggccaggagagcgtcaccgccggcattttattgcgtttctgtgaagagctttttgccctggtcaagctggtacaaaccccgcagaccatcgccgactgggcgaccatcagccagcgggtgctaatctcactcggtggggatgatgccgcaagcgactggcaggagctctgcctgcgcgataccctggcgcaactgctcagcgaggccgaccaggcggcattgacccgcccgctggagttgcccgcttttttacggctgttgcgcggccggctcgatggcgccgggggcacccggggcttccttgacggcggtctgaccttttgcaacatgttgccactgcgcaccattcccttcccggtggtctgcctgttgggcttaaataacgatgattttccacgccaggagccggccgccgattttgatctgctggccgccgctccccgcccgggggatcgctgccgccgccgggatgaccgtttcatgtttctggaatccctgctggccgcccggcggcggctctatatcagttatgtcggccgcagcctgcgtgataaccggtccctgccgccgtcggtgctggtggacgaactgctcacctgcctggcggcgatgtcgccaaaagccgccggggccaacgacgaggcgcatcggcaaagggtggcggcccgcttcaccgtcgagcaccccctgcaaccattcagtccccgttattttcagaatacggccgggcccttgttcagctatgcccgtgaatatctgccgccccctgcatcgccggacgctgctccagccaccgtgagcggcccccgtgctcagttaccagccgccgctgaccatgattccgtgccgccggccgcctggatgtccacgaccagcacggccatttccctggccgatctccacgatttcttccgccaccccgccggttggtatggccgccgccgcctgggtctgctgcccccccagcagcaaccggccggggtggaccgccagcccctggaacttgataacctggatcgttaccggatcggctcccggctcttgcagcaacccgctttgttgttgcccgatggggcagccggtgagccgccctggcaggcgctgtatcagcaattgcgagccggcggcgaactgcccccggggcgggccgcccaacccgccctgcgcgagctggtggccgacttacaacccctggccacctttctggccggtaatcccggtggcaaaactctgccgcccctggtcctggatcttgccctggccgacaacttacgcttaagcggtgaattgagtcagcgcgccaccgccgccctgctgcgctggagcccctcccgggcctcggccaagctgtggctggcgggctggcttgaccacctggccctctgcgcccaggcgccggaagaccaggactggcagaccatcatggtgggccgcgaccagcagaatggggccgatatccgtatctttcgccccttgtccagcgagctggcccgggagttactcaccaaactgttggcgctttttgtggccggacagcaaggcccgctgccctttttcccgcgttcagcctacgagtttgtcgccaaaaccatgaccgcccaggaagagtcacaggaggccaaaggctggcaggcggcccgccaggccttttacggcgatggttatcagcggggggcgccaccggagagcgctgacttttatgtggaaacgctctttttcggcccctccggacggtcaccggctgccacggaattacccccgggctttgcggcaaccgcccggctggtttatgagccgctgctgcaaaacctggaacaggtgtaa

SEQ ID NO: 157289 - protein, 1155 aa, delta proteobacterium MLMS-1
MNQRRLLLYRSNRIEELLACLEAELAVASSAGSSAGSSAGSSAPLTAECIVVQSQGMAVWLEQRLAERFGIWANPDFPHPRRFHQRLLQAVLGRQAVADFSHRESFTLALLALLPKLPQRPEFAPLARYLDGADDWKCLQLAEKIAYLFDQYAVYRPEMVLAWERGEEQAGTAGAELADNRWQPLLWRRLSRQLGSPVAPLTEAFASLRQGRLAAPELLPPRAFLFAITTLPPLYLNLLDQAARIIPIHLLLFSPAREYWADIFTPAALREMELRHSDAALLEEGEPAALHLSGGHPLLASLGTVAREFQDILEEQSDYQPATDGERFPENQENPGLLARLQQDIAQLKEPAAGEGEESQPPTADDSLAIHICHSPLREVEVLQDQLLQLLDGEEFSPHDIVVMVPDIETYAPLIEAVFNRPPGDRRRIPYRIADRRLSREGELLDTLLRFFEVARGRLEVSAVLDLLAAEPVRRGLGLDGGQLQRIEQWLRQSRVCWGMDEEHRQHHGQPAQRLNTWRFGLDRLLLGYAMPAASDVFADILPHADIEGQESVTAGILLRFCEELFALVKLVQTPQTIADWATISQRVLISLGGDDAASDWQELCLRDTLAQLLSEADQAALTRPLELPAFLRLLRGRLDGAGGTRGFLDGGLTFCNMLPLRTIPFPVVCLLGLNNDDFPRQEPAADFDLLAAAPRPGDRCRRRDDRFMFLESLLAARRRLYISYVGRSLRDNRSLPPSVLVDELLTCLAAMSPKAAGANDEAHRQRVAARFTVEHPLQPFSPRYFQNTAGPLFSYAREYLPPPASPDAAPATVSGPRAQLPAAADHDSVPPAAWMSTTSTAISLADLHDFFRHPAGWYGRRRLGLLPPQQQPAGVDRQPLELDNLDRYRIGSRLLQQPALLLPDGAAGEPPWQALYQQLRAGGELPPGRAAQPALRELVADLQPLATFLAGNPGGKTLPPLVLDLALADNLRLSGELSQRATAALLRWSPSRASAKLWLAGWLDHLALCAQAPEDQDWQTIMVGRDQQNGADIRIFRPLSSELARELLTKLLALFVAGQQGPLPFFPRSAYEFVAKTMTAQEESQEAKGWQAARQAFYGDGYQRGAPPESADFYVETLFFGPSGRSPAATELPPGFAATARLVYEPLLQNLEQV

SEQ ID NO: 157290 - DNA, 3306 bp, Oceanobacter sp. RED65
  CDS (1)..(3306): transl_table=11
atgctaaatgtttaccaatcaaaccgtatggagggtttgctcggccaattgatcaaattggttttgcaatctgactcatcacctttgcagcccaagaccatagtggtggaaaacccaggattggctcattggttgaaaatgcagttagcccaaaccttggggattgccgctaatatccagttccctatgccgtctcgctttttttggcagctgcaacgtgatcttgtgtctgatagtcaggaggcatggcagactgaatccattttcaacaaagaccctttgacgtggtttgttttcgacgtattgagtgaatcgcaaatactgcaacgccctgggtttgaattgctggcggattacgttaaggattcagacgacgaatctttgcgtctatatcagttgtctactcgtattgccgatatatacgatcaatatctagtatatcgtcccgattggatcaaaagttgggagcagcagacgtttgcaattgacgggcaaccattggaggaagctcgatggcaggcagagttatggcaaattttgagacaagaagcgatatccagaggcttccctttacatcatagagccagcttaactgaagattttttacatttgctgcaaaccgcagaatctatcgagtctctacccaaggatgtcatcttctttggcttctcgacgctcccaaaaaatcaaattgaaagtctcgcattgttatcgtcgcattgcgatgtgcacttgctaacgccaaaccctagtcaaacgtattggggtgatattttggatgagcgcttacaggcacgcttgcgattgcgtggaaagtcagtgcctatggccgactcaggcaatgcactactagcgtcgctagggcgaatgggtcaagaatatcaacgtctgttattagatcttgatgtttatgaagagcatgatttgtttgtagacgcggacgatcaaagtttgcttggacgcattcagaatcagattctgcatttgcagcaatcgtcatctcaacctgaacatatagagccaaatgatgacagcattaaaatagtaggctgtcatagtgccatgcgagaagtggaagtattgcatgatcacctactcgatcttttgcagcagtcggatgtagacccgcaagatatagtcgtgatgattcctgatgttgctcggtacgctccctatattgatgcggtatttcagggcggtgtagacaaccgtcagggagatcgagtacgcattccttattccatttcggatcggccgattcaggaagagcatccactgattaatggttttattcagctattgaatatgccaaaaagtcgcatgtcttatagtgaagtgattgcgcttctggaaattccagcggtataccgaaagtttgatttagatgaaaagcaacttcatcaagtgaaacagtggctagaactagcagctattcgttggggatatgatgaaacgcatcgaagtaagcaaggattacctaagtggcagcaaaatacttggctacatggttttcagcggttgctgatgggatatgcatttagcgagcgcttggcaccaaacgacgaacttccttttgatatttctcccgtggaaaatgtagaagggttagaggcggccagccttggtccggttatgaactttgttaatgaactgtatgagttcgtattggctacggaaaatttacattcttgtactgaatggcggtattttctacaagatagtttgcaaaggttttttgatgtaactacagaagagcagcccgtacttgagcaaattcatcaagttttagaaaactggttgcaaaccagtcaatacgttaatttttctcatgacataccattctctgttgtttatcagggggtacagcaaggactgcaaaaaaataatggctcgcaacacttcatgatcgggcgggttaacttttgtacccttttgcctatgcgtagcattccatttaaatacgttgccgttttaggattgaatgaccaagaatatcctcgcactgtaccaggcaatagtttggatctaatgcgctttaatcggcgtgtcggtgatcgaaatcgccgagatgaagaccgctatttatttttggaagcaatcttatctgcaagacaagggctttggcttagttatcgtagcttagaccaaaagcaaaacacgccaatgacaccttctgtcgtattggccgaatttatggattatcttgatatcaattttttctcaggtgagagtgcagccagtcaaatattatttactcagcatccattgcaggcatttaatcgtcaatatttcatagcaggtagcaaactacattcatatcaaaccaattggtttaaatcgatttatcaattgcaaagcgatgcgaatcaaacgtttcaagaggaaaaagggaaatcctcagttcctgttttatcgcaacctaacggcattaacatgttagaggttgggttgagtacattggttcggtttttccaattgccagctagggcgttcttgaatcagcagttgaatattcaatttcataatcttgcagatatgcatgaggatgaagagccatttgagctttcagggttagatagatacgcggcaaaagattacatattgcagcaaacgattcaaggtagatcgatcgacccacgacgcttgcagccatggttaccgtttggaaaaattggtgagcgtcattggcaacggacaagacagtcggttgaagacgtattagctgaagctacctctatgggcttggaaaataaagagggaccactagaaattaacttggcatgtgagtatcaaaatggtcaaaatacttcattagtcggctggataaacgaagtgtatcaagggcgactagtattgttgaaggtggcaaaatttcaagcgaagcaccttattgaactattaatcgaaagtgcagcattaaatgcgcagggttataactatagcggatgccttgttactcaggatatccgtatcaatgtaaagcccatgtcagcaagtgaagcaaagtcatatctaaataaactcttatcttattatttctctcatcaaaatcagcctttaaactttatgccagagaccgcttgggcactttataatccaactacgaagcaagatttacgatcacaaaaagcattgcagcgttttgttgaggtcaatgattacagttattatgatcccgagcgcttagatcctcattatcaccgctgcttcggtaatgtgagtatattaccagagcaactgattgaggtagcacatgatttatttgagccctttgtaggtggcgataaattggaggtatcgcaatga

SEQ ID NO: 157291 - protein, 1101 aa, Oceanobacter sp. RED65
MLNVYQSNRMEGLLGQLIKLVLQSDSSPLQPKTIVVENPGLAHWLKMQLAQTLGIAANIQFPMPSRFFWQLQRDLVSDSQEAWQTESIFNKDPLTWFVFDVLSESQILQRPGFELLADYVKDSDDESLRLYQLSTRIADIYDQYLVYRPDWIKSWEQQTFAIDGQPLEEARWQAELWQILRQEAISRGFPLHHRASLTEDFLHLLQTAESIESLPKDVIFFGFSTLPKNQIESLALLSSHCDVHLLTPNPSQTYWGDILDERLQARLRLRGKSVPMADSGNALLASLGRMGQEYQRLLLDLDVYEEHDLFVDADDQSLLGRIQNQILHLQQSSSQPEHIEPNDDSIKIVGCHSAMREVEVLHDHLLDLLQQSDVDPQDIVVMIPDVARYAPYIDAVFQGGVDNRQGDRVRIPYSISDRPIQEEHPLINGFIQLLNMPKSRMSYSEVIALLEIPAVYRKFDLDEKQLHQVKQWLELAAIRWGYDETHRSKQGLPKWQQNTWLHGFQRLLMGYAFSERLAPNDELPFDISPVENVEGLEAASLGPVMNFVNELYEFVLATENLHSCTEWRYFLQDSLQRFFDVTTEEQPVLEQIHQVLENWLQTSQYVNFSHDIPFSVVYQGVQQGLQKNNGSQHFMIGRVNFCTLLPMRSIPFKYVAVLGLNDQEYPRTVPGNSLDLMRFNRRVGDRNRRDEDRYLFLEAILSARQGLWLSYRSLDQKQNTPMTPSVVLAEFMDYLDINFFSGESAASQILFTQHPLQAFNRQYFIAGSKLHSYQTNWFKSIYQLQSDANQTFQEEKGKSSVPVLSQPNGINMLEVGLSTLVRFFQLPARAFLNQQLNIQFHNLADMHEDEEPFELSGLDRYAAKDYILQQTIQGRSIDPRRLQPWLPFGKIGERHWQRTRQSVEDVLAEATSMGLENKEGPLEINLACEYQNGQNTSLVGWINEVYQGRLVLLKVAKFQAKHLIELLIESAALNAQGYNYSGCLVTQDIRINVKPMSASEAKSYLNKLLSYYFSHQNQPLNFMPETAWALYNPTTKQDLRSQKALQRFVEVNDYSYYDPERLDPHYHRCFGNVSILPEQLIEVAHDLFEPFVGGDKLEVSQ

SEQ ID NO: 157292 - DNA, 3237 bp, Synechococcus sp. RS9916
  CDS (1)..(3237): transl_table=11
ttgctgaccctctaccgcagcaaccggtcggaagtgttggcggatgtgttggccgccaacctcagcctgcatccacccggtgtgttggaagaggcccaggtggtggtgaacacctggcccacaagccgatggctgggagagcagctcgcacttgccaatccttctggcatcaccgccaatctgcgctttcccttcccgacaagcctgctgcgacacacggtggatgggcttctggaacagcaaagctcaggaggcggagccgacccttggcgggcacaaaacctggtctggccgctcttggagctgttacccgagcttttggaccatccagccagtgccccgttgcagcactggttgaacacccgtaagagcgcagcgcttgaagtgctcgacccaccgctgtggcaactggcccgcgccattgctgatgccatcgacgattacagcctgtatcggcccgccatgctcgaggcctggctgaagggacaagccacggatgcccgcggaacgcccctctccccaaccatgctgtggcagcagcaactgatgcagcaactgcacagccggctcggctgccttcccttcggcatgcgcgcccggcaactgattcggcggttgcaggagggatggcgtccggaacgtcccccccaaccacctctgcgcttgtttggcctcagcagcctggcgccggtgcaggtggaactgcttcaggccctgtcctgtttgcgcagcatcgagctgtacctgctgaccccctgccccgagctctggcagcggcagagcagcattgaatctcaggcaccccttgatgaggagtggcttctgaccgttcccagcgttgaagcgcggttcggacgactcggcgctgaattccagcaactcttggagggcagtggtgaaacccagctcggcagctggcgagctctggatccatttttcttccctgccaccactgccagttcacaagggaaggagcccacgctgctggagcaactccaggagcacctggttcatggcacgccaaccgatctcctgccacgaacagaggacgatcaatcgctccaatttcatgcctgcccaggacgtttgcgtcagttgcaggtgctccgggaccagatcctccaactgctggccaacgatgacagcctggaaccccgcgacatcctggtgatgacaccccaggtggaagcgtttgctcccctggtgagcgcggtctttggtgacaacgacgccactggcgtacgcctcccctggcgtctcacagaccgcagtcagcagagtgaagccgggatcagccagggggtcctgcaactgctagcccttggcggggagcgactcacggcctccgccctggaaacagtgctggcgaatgccccgctcctgcgcgcccatcaactggagcccgacgaggcagaagacatcacccagtcgctccaacaggccggcttccgttggggcctcgacagccgtgatcgaggtggcgatcccacccacagtctggcttgggccatcgaccgactggtgctcggggtggtgtacccggagacacctggtctagccctcgagaacacggcccccatggctctgcctgggagcctggaacaacaaggccgctggctgggactgctgcgccaactccagcgcagccttcagtggctcagccacagccgatcggttcaggcctgggtggaaggcctacgcccacagctgatggcgctgtttgctgatggtggtgactgggcttgggaactgcagaccatccattccgtactaacggactggggtgaggtggcagggaacagcagcctggagctctctgcaccggtggtgggagaggtgctggcagaacgcctcagtgaaggcagtggtcgttttgggcatcgctccggggccctcaccatcagtgccttggaaccgatgcgggcgattccccacaaggtgctggtgctgatgggactggatgcgggcgccttcccgcgccaacgccagcgccccggattccacttgatggaacagcaacggctgctgggagatcccagcagtggagaccaggatcgctatgtgctgcttgaggccctgctttccgctcgccaacacctgctggtgagctggagctgccgtgacgaacgcaccggcgaaccactggaagcctccacaccggtacgccagtggatcgacctgctcccccaagtgccggtgcgtgagcatgccgccaatgcccttgagcgcagcaattttctgccttctgaggcctggccccccgccagttgtgatcaacgtctgctgcaggtgaggcagcacctcgatgcaggcaccattgggggaactgctggcctggcgttcagcatcaccccacacaaaagtccggacggtccggccttaccgctcagcgcctgggatgacctgatctcctgggttaccgctccccaaaagcagtggttggagcaactgggactgcggccacgcgaacacgagaacgccgttctcgacctggaagacctcagcctcgatgaacgccagcggtcagcactgctgcgccaggaactgggccgtgaccaggaggaaaatgcggagcccgactggctcgctcttgaccgcggacgaggacagctcccccctcattctgctggtgccttagaggcccaccagctggagcagcgctggaccagcctcagcacctgcctgtcgtcactcggggaggagcgacgcgacgccgtgagcatgggtccatggcaagcggagctgtcgttgcgcgatgaccaactggtgctggtgcacactgctcggccccgtagtccacagcggcagcagctgtggctcgagctactcctggccacggccgcaggcagcaagctccgctccgctgtgttggtcggtcgggatggtcatcgcttccgggtgctcgagcgcattagcccccccacccgcgaccaatgcactgctctgcttgaccagcaccaagcctggcgcgagcagtaccagcagcgatgctggcccctgcctccggaaacaggctgggccttcgccgtaggggaggcgaagggcaaggggtggagcaaagcccgcgacgcctgggaaggcaatgccgttttggcaggggagcgactcgacgccgtgcagcaactctgtttcggctccgatctacccctgggtgatctgctcacagacgacgcccaggccttggcactcacacttcatggaccactgctggagcggcggcaggaggtgaagggttga

SEQ ID NO: 157293 - protein, 1078 aa, Synechococcus sp. RS9916
MLTLYRSNRSEVLADVLAANLSLHPPGVLEEAQVVVNTWPTSRWLGEQLALANPSGITANLRFPFPTSLLRHTVDGLLEQQSSGGGADPWRAQNLVWPLLELLPELLDHPASAPLQHWLNTRKSAALEVLDPPLWQLARAIADAIDDYSLYRPAMLEAWLKGQATDARGTPLSPTMLWQQQLMQQLHSRLGCLPFGMRARQLIRRLQEGWRPERPPQPPLRLFGLSSLAPVQVELLQALSCLRSIELYLLTPCPELWQRQSSIESQAPLDEEWLLTVPSVEARFGRLGAEFQQLLEGSGETQLGSWRALDPFFFPATTASSQGKEPTLLEQLQEHLVHGTPTDLLPRTEDDQSLQFHACPGRLRQLQVLRDQILQLLANDDSLEPRDILVMTPQVEAFAPLVSAVFGDNDATGVRLPWRLTDRSQQSEAGISQGVLQLLALGGERLTASALETVLANAPLLRAHQLEPDEAEDITQSLQQAGFRWGLDSRDRGGDPTHSLAWAIDRLVLGVVYPETPGLALENTAPMALPGSLEQQGRWLGLLRQLQRSLQWLSHSRSVQAWVEGLRPQLMALFADGGDWAWELQTIHSVLTDWGEVAGNSSLELSAPVVGEVLAERLSEGSGRFGHRSGALTISALEPMRAIPHKVLVLMGLDAGAFPRQRQRPGFHLMEQQRLLGDPSSGDQDRYVLLEALLSARQHLLVSWSCRDERTGEPLEASTPVRQWIDLLPQVPVREHAANALERSNFLPSEAWPPASCDQRLLQVRQHLDAGTIGGTAGLAFSITPHKSPDGPALPLSAWDDLISWVTAPQKQWLEQLGLRPREHENAVLDLEDLSLDERQRSALLRQELGRDQEENAEPDWLALDRGRGQLPPHSAGALEAHQLEQRWTSLSTCLSSLGEERRDAVSMGPWQAELSLRDDQLVLVHTARPRSPQRQQLWLELLLATAAGSKLRSAVLVGRDGHRFRVLERISPPTRDQCTALLDQHQAWREQYQQRCWPLPPETGWAFAVGEAKGKGWSKARDAWEGNAVLAGERLDAVQQLCFGSDLPLGDLLTDDAQALALTLHGPLLERRQEVKG

SEQ ID NO: 157294 - DNA, 3492 bp, Vibrio sp. Ex25
  CDS (1)..(3492): transl_table=11
ttgtttactgtttatcactccaaccaagttgacgttcttaaatcactccttgtcgaactgattcgaatcggtccgctggaaaacccgttcgaaaaagaacaaattctggttcaaagtccgggcatgtcccagtggctaaaaatggaattggccaaagagtttggtgttgccgcgaacattgattttccgcttcctgctaccttcatttgggaaatgtttacgcaggtgttgccagacgtgccaaaacgcagtgcgtttaacaaagaagcgatgacttggaagttgatgcatctgctgccggggcttctcaaccaagacgtgttttcgccgttagcgcagtacctcaaagatgacagtgatcactctaagctgtatcagctggctgagaaaattgccgatattttcgatggttacttggtgtatcgtccggagtggatcgcaagttgggaagctgggcatagtgtgccagagctggaagatgagcatccgtggcagccgatcttatggcaagcgttgtatgatcacactgtgtcattaggacagtctccatatcaccgtgccaacctttatgagcactttatcgacacgttagagagttttaacggcaattttgaccatttacccaagcgtttgtttgtttttggcatttcttcgttgccgcctcgctatatggatgcgctaaaagcaattggtgaacacatcgacgtgcatctgatgttcaccaacccgtgtcgttattactggggtgaagttcgagatcgcaaatatctggctcgtttggcggcgaaacatcgtcagcacgttgtgtggcatgacgatcactcggaagtgcaaggtgaaactgagcaactgaaaggatcactggaagataatgtgatcgatgagctgcacaccgatgtggtcggaaacagtctgttggcgtccatgggtaaactcgggcgtgacaatatgtatctgttgtctcagctggagtctcatgaaattgaagcgtttgttgatgttgagcgcgacagtctgctccatcaattgcaagcggatattctcaatcttgaagaacatcaagatgaccaacagattgaaaacagtcatcacaaacaagtggttcgcttgggtgataaatcactcagcctgcacgcttgccacagcccgatgcgtgaagtggaagtgctgcatgatcaactattggcgatgttcgatgctgacccaacgttaaaaccgcgcgatattatcgtgatggtcgcggacatcaacgcttacagccctgcgattcaggcggtctttggtaacgcaccgggtgagcgttttattccctattcgatttctgaccgaaccgccgatcaagagagcccaattctggccgcatttatgcagttggtgaacttacccaatacgcgctgtttggcatcagaactactcgaacttctggaaactccagcgatattaaagcgttttgaactcagcgaagatgatttcttacaagccaaacaatgggttgaagaatcgggaattcgctgggggttggatgccaataccggacgcgaatttgaactgccggaaacccgtcaaaacacatggcaatttggtattcaacgcatgttgcttggctacgcgatgccagaatccgcaggtttgtttgaaaccgagcaaggcagtttgtctccgtacaacgaagtgcaaggcatgggcgcagagctggcgggcaagttggcacactttatccaacaaattagcacttatcgaagcaaactttctcatgttcagactattgatagttggcgagagacattagtttcactgctggatgacttcttctcggttgagttagaaggtgaaatggcgctcaaatccattcgagatacgctcagccaactcaaagagcaattagctgatgccgcatttgatgatgcgttatcgccgtcgatcatcagccaataccttcaaaacaaattatctggcacacgagtcagccagcgcttcctggctggtcaagtgaacttttgtaccctgatgccgatgcgatctattccgtttagaaccgtatgtctactggggatgaatgacggcgtgtacccgcgttctatgccgccagaaggctttgacttgatgacgggaagaaccaagccgggcgaccgttcgcgccgagatgatgaccgttacctattcctcgaagcgatgttgtctgcacagcaaacgctctacatcagttatgttggccgttcaatccaagacaacaccgagcgagtgccttcggttctggtttctgagctgatggaatactgccaccaaaactattgtttaagtggtgatgaagcgttgcccgttgatgagtctggcgacaatttattaaatgcgttggtgaatacccacgccatggtgccgtttagcccaagtgcgttccaaggcacgcacgccagctacgcgaaagagtggattccagcggcattgactcaaagtagtcaatcgcaaggctatgttcgtcgtgattttaatcgggcattagacgactatctgttaggagcgacgttcccacttgagctcgacttagtcgagttgcaacgtttctggcgcttacctgtgcagtattttttcaatcgtcgcttaaaagtaatctttgaaccgccactgccggtgatggaagacgacgaaccctttgttttaggtggtttggaaagttatcaaatgcgtgatgagctgttagaagccttgcttgaaacgacattgatgcagccagagaaaaaaacagaggtgcttaaacactttatgagtcaacagcgtgcgcaaggcaaactgccggtgggggcgtttggtgatatcgaatttgaaaccaaccgagttcaggcggaagagctggtggataaactggcgtttttatctggtgcgcctcaagacgatttggaaatcgacctgacgtttgactccttatttgagcgaaatgaaggcgaagagaaaaacgttcgcctaacaggttggctaacccagtgttaccaatctgggttgattcgctatcgaagcggtaagattcgatcgcaggattaccttgcagcgtggatcgatcaccttgccatgtcggcgtcgggttatgccaagaaaactcacctgattggctacgatcgtaaagaaggcgcgctgcatttgatctactcagaaattgccgatgcgcagtatgccaaacagctactgactgaattagttcgcttattcttcgaaggcatgactaagcctttgccttatttcccgaaaacggcgttggcttgtgttgaagcgggctttagccgcggtcagtgggtcgatgacgaagagaaatctttgaagaaaatggctgacgcattcaatgatggcttcatgagcccgggtgaaggcaataatgcgtacatctctcgaatttggcctgcttggaatgatgagttggcctcagaagttcgtttgctgacagcattagttttgcaaggtgcgcgcttagcggttcaagacgctgatgacgtaaaagcgtaa

SEQ ID NO: 157295 - protein, 1163 aa, Vibrio sp. Ex25
MFTVYHSNQVDVLKSLLVELIRIGPLENPFEKEQILVQSPGMSQWLKMELAKEFGVAANIDFPLPATFIWEMFTQVLPDVPKRSAFNKEAMTWKLMHLLPGLLNQDVFSPLAQYLKDDSDHSKLYQLAEKIADIFDGYLVYRPEWIASWEAGHSVPELEDEHPWQPILWQALYDHTVSLGQSPYHRANLYEHFIDTLESFNGNFDHLPKRLFVFGISSLPPRYMDALKAIGEHIDVHLMFTNPCRYYWGEVRDRKYLARLAAKHRQHVVWHDDHSEVQGETEQLKGSLEDNVIDELHTDVVGNSLLASMGKLGRDNMYLLSQLESHEIEAFVDVERDSLLHQLQADILNLEEHQDDQQIENSHHKQVVRLGDKSLSLHACHSPMREVEVLHDQLLAMFDADPTLKPRDIIVMVADINAYSPAIQAVFGNAPGERFIPYSISDRTADQESPILAAFMQLVNLPNTRCLASELLELLETPAILKRFELSEDDFLQAKQWVEESGIRWGLDANTGREFELPETRQNTWQFGIQRMLLGYAMPESAGLFETEQGSLSPYNEVQGMGAELAGKLAHFIQQISTYRSKLSHVQTIDSWRETLVSLLDDFFSVELEGEMALKSIRDTLSQLKEQLADAAFDDALSPSIISQYLQNKLSGTRVSQRFLAGQVNFCTLMPMRSIPFRTVCLLGMNDGVYPRSMPPEGFDLMTGRTKPGDRSRRDDDRYLFLEAMLSAQQTLYISYVGRSIQDNTERVPSVLVSELMEYCHQNYCLSGDEALPVDESGDNLLNALVNTHAMVPFSPSAFQGTHASYAKEWIPAALTQSSQSQGYVRRDFNRALDDYLLGATFPLELDLVELQRFWRLPVQYFFNRRLKVIFEPPLPVMEDDEPFVLGGLESYQMRDELLEALLETTLMQPEKKTEVLKHFMSQQRAQGKLPVGAFGDIEFETNRVQAEELVDKLAFLSGAPQDDLEIDLTFDSLFERNEGEEKNVRLTGWLTQCYQSGLIRYRSGKIRSQDYLAAWIDHLAMSASGYAKKTHLIGYDRKEGALHLIYSEIADAQYAKQLLTELVRLFFEGMTKPLPYFPKTALACVEAGFSRGQWVDDEEKSLKKMADAFNDGFMSPGEGNNAYISRIWPAWNDELASEVRLLTALVLQGARLAVQDADDVKA

SEQ ID NO: 157296 - DNA, 3297 bp, Alteromonadales bacterium TW-7
  CDS (1)..(3297)
atgctcaatattattcaatcaaaccgtatggaagccctgcaagctcagtttcatcaactgttaaaggtaagcccattgcaaagcccgttcgataaagaagtggtgctggtgcaatctccgggtatgtcgcagtggctaaaaattggcttgagtgagcatttaggtgtggctgcacaggttgattttccgttgccatcgagttttatttggcaactttatcagcagctactaccgaatgtgcctaaagagtcggcctttaacaaacctaaccttgcatggaaattattttcaattttacccacttgtattgacgaaccgctttatttacccctaaaaacctacttagagggcgatattgatggccaaaaaacctttgctctatgtgaaaaaatagccgatgtgtacgatcaatacctaatgtatcgaccgcattggatagcaacttgggatagtggcaatgatgaacttgatgacgtagatgtcaccattgcaccatggcagcctgatttatggcgccgaattgtaaaattaagcaaagagctgggtcaaagccaatttcaccgcgcaaatatgcaggggcaattacttgctgcgttggaaaatatggacaacagcttattacccaaacgcattagtttatttggtatatcagccattgccaattctcagcttgatgtgtttgaagcattgagcaaaaaaacagaggtgtttttattcttttttaacccgagtgagcattactggggtgacataattgacgaaaaaacagcggccaaaataaacgctaaatacgccaaaatgccgctggtggaagcgcagcaaaaaaaacaatctaacccagatgaagactattactttataggtaacccacttttatcgtcgtgggggaagttaggtcgcgattattttgaacagctagtgcaacttgatgcccgttggattgatggctttatagatgcttttgacactaccttacttgggcaagtacaaagcgaaatttatcagcttgcatttaaaggggagtcgcttaccgataacaaagaatggtttataaacgatgaaggtaaattatcagtaagtgcaaacgataccagcattacccttagtgactgccatacaccgcttagagaagttgagcgattacacgactacttacttaatttgtttaaccaaaatcctgcgcttaccccaaaagacattattgtaatgatgcccgatgtaggcacatacagcccctatatagaagctgtatttggtggtgcgcaaggcagccgctatattccctacgcgttagctgatttagccatagagcaagaaaaaccagtactaagctcgtttgctagcttagctaacttaccgttctcgcggtttggcgtatcagatattttagatttactacaagtaacccaaatagctgaaaagtttggccttgaagcgcacgagtacgaacaaatacaatactggcttgaacgcgtaggtgttaaatggggcatcaatgccgagcataaacacagttttgatttacccgccattgaactaaatacatggcagcatggtttaaaccgtttattactgggtattgccatgcgcgacgagcaatgcccatttaatggtatttacagcgccgacgaagtagaaggaatggcgcttgatacgcttaataaactggtagactttatcgatgtgcttcaaaactttaaagccaagcttacccccgacgacaccctcactaataaggcgcaaattttaagcgagctacttggggctgtttacgagagtgaaagcgacgacagttgggatttattagtgctgcaaaaagtgcttgaagatattcaaaagcaccacgataacggcgactacaatcaagcagtgtcgcagcgcatagttagctatttaataaaacagggtatacaagaaaaaggcgtcggtcagcgatttttagtggggcaagtaaatttttgtacgcttatgcccatgcgcgccgtgccatttaaagtagtgtgcatgctaggtttaaacgacgctgactatccacgtaatgtgcagcctattgggtttgatttagtaccacactctaaaaaacaaaaaggtgaccgatcacgaaaattagatgaccgttacctatttttagaagcgctacttagtgctcgtgaaaatctttacatgagctatattggccgctcctgctttgataaccaaccccgtatgccatcaaccctggtgagcgagttattagaatacatagggcgtagttttacgctgggtgacgactcatctaaagcattaccggcatgtttgattagccagcaacacttgcaaccctttaatagccactactaccaagataataaaaatagtaccgtgcttaatgatcatagttataacccaatttggttgccaaatgagcccatatttccagaaccagttaccgcacttgatgtaaaaccacctgaacagttagagcttgatgtatttatacgcagtgtttgcagcgcacaagagagtttttacaatcaaaccttgggtttacgtttgccgcaatttaacgaagtagcaaaagacgaagagccatttagtattgatgcgctgcgccgttacttttatttagacgaaatattagaagccacaattaacgatacgccaatgagtactgagcaaattttgcaacgcggcgagttaccgcaagcgaatgtgggaagtttagttttacaaagcatgcaacaccgcgttgacgcgcttgcagggcaggtgaaagagcaaataaaagcgggtaaaagtgagcctatagaggtgtcgtttaatattcaaggaacacaaatccagggctggcttaaccatatttttatgcaaaagcaggtgttttaccgtagcgccagcattaaagccaaagacatgattagaggctttatttatcacctagtggcacaaagtttggggcataacctcgaaactttattacttgggcttgataaacaaattagctttgcgcctatgagcaaagccgacgctgatttaattttggcagattggtttgaattatataaagcactgcgtaaagagcctgtggcgttttatccagtaagtggatacgaatacataaaaacgggtggcgatatggcaaaagcgatgaataaatttagcccgcagtacataggccgaggtgaaggtgaaaacccctacattagattaacggtgcaatcacttaacgactgccaagacgagtttattagctggaacgaaaagctactcgcgccgttatatgagcatgctaaggagagcgaccatgcaagcgcttaa

SEQ ID NO: 157297 - protein, 1098 aa, Alteromonadales bacterium TW-7
MLNIIQSNRMEALQAQFHQLLKVSPLQSPFDKEVVLVQSPGMSQWLKIGLSEHLGVAAQVDFPLPSSFIWQLYQQLLPNVPKESAFNKPNLAWKLFSILPTCIDEPLYLPLKTYLEGDIDGQKTFALCEKIADVYDQYLMYRPHWIATWDSGNDELDDVDVTIAPWQPDLWRRIVKLSKELGQSQFHRANMQGQLLAALENMDNSLLPKRISLFGISAIANSQLDVFEALSKKTEVFLFFFNPSEHYWGDIIDEKTAAKINAKYAKMPLVEAQQKKQSNPDEDYYFIGNPLLSSWGKLGRDYFEQLVQLDARWIDGFIDAFDTTLLGQVQSEIYQLAFKGESLTDNKEWFINDEGKLSVSANDTSITLSDCHTPLREVERLHDYLLNLFNQNPALTPKDIIVMMPDVGTYSPYIEAVFGGAQGSRYIPYALADLAIEQEKPVLSSFASLANLPFSRFGVSDILDLLQVTQIAEKFGLEAHEYEQIQYWLERVGVKWGINAEHKHSFDLPAIELNTWQHGLNRLLLGIAMRDEQCPFNGIYSADEVEGMALDTLNKLVDFIDVLQNFKAKLTPDDTLTNKAQILSELLGAVYESESDDSWDLLVLQKVLEDIQKHHDNGDYNQAVSQRIVSYLIKQGIQEKGVGQRFLVGQVNFCTLMPMRAVPFKVVCMLGLNDADYPRNVQPIGFDLVPHSKKQKGDRSRKLDDRYLFLEALLSARENLYMSYIGRSCFDNQPRMPSTLVSELLEYIGRSFTLGDDSSKALPACLISQQHLQPFNSHYYQDNKNSTVLNDHSYNPIWLPNEPIFPEPVTALDVKPPEQLELDVFIRSVCSAQESFYNQTLGLRLPQFNEVAKDEEPFSIDALRRYFYLDEILEATINDTPMSTEQILQRGELPQANVGSLVLQSMQHRVDALAGQVKEQIKAGKSEPIEVSFNIQGTQIQGWLNHIFMQKQVFYRSASIKAKDMIRGFIYHLVAQSLGHNLETLLLGLDKQISFAPMSKADADLILADWFELYKALRKEPVAFYPVSGYEYIKTGGDMAKAMNKFSPQYIGRGEGENPYIRLTVQSLNDCQDEFISWNEKLLAPLYEHAKESDHASA

SEQ ID NO: 157298 - DNA, 3480 bp, Pseudomonas putida GB-1
  CDS (1)..(3480): transl_table=11
atggctactaccactctccaccccggcttcatgatcgtccacggcaaccgcctcgacgacctgcgcagcctggtagtgagctggatgcgtcgctatcccctggcgccgctggaaaacgaaatagccttggtgcaaagcaatggcatcgcccaatggctcaagttggccctggccgaagacccgctggaagatgacctgggcggctgtggcatcgccgccgcaatcgatgtgcaactacccggtagcttcatgtggcagctataccgcagcgtgctgggccgtgacgaaattcccgaagtttccctgctcgacaaggccccactcacgtggcgcctgatgcgcctgttacccgccctgatcgaacgcccccatttcgagccgctgcggcgcttccttaccgacgacagcgacctgcgcaagcgctaccagctagccgaacggctagcggacctattcgaccagtaccaggtctaccgcgccgactggctcaaggactgggccgcaggcgagcatgtcctcaacaccgcccgtggcgagcgcaaagcgctgccgccgggcaaccgttggcaagccgagttgtggcgagcattactggaagatgttggcgagcagggtatggcgcagagccgtgccggggttcaccaacgcttcatcgagcggatcaatagcctggagcaggcacctgcagggctgccaccgcgggtgatcgtgtttggcatctcctcactacccgcccaggccctggaagcactggccggtctggcgcgtttcagccaggtgctgttgtgcgttcataacccatgccgccaccactgggccgacatcgttgccgacaaggacctgttacgccaccagtacaaacgccagcaacgcaagcagggcatgcccctgcaactggatgaccagtcgttgcaccagcatgcccatccgttgctggccgcctggggcaaacaaggccgcgactacatcaacctgctcgacagctacgacgacccgggcagctaccagggcgtgttcagcgatggccgcatcgacctgttcagtgacggttcgcccaccacgctgctcaatcaactgcaggacgacatcctggagttgcgcccgctcaccgaaacccgtgagctgtggccgcccgtggacactgcaaaggatcgctcgatccgcttccacatcgcccatagcccgcaacgtgaagtggaaatcctccacgaccaactgttggcccgcttcagcgccgacgcaactttgcgcccgcgtgacgtgatcgtcatgctaccggccatcgacacttacgcgccgcacatccgcgctgtctttggccagttgcagcgcaacgacccgcgctacatcccgttcaccctgaccgaccagggccagcgcggccgcgaacctttgctgatcgctcttgagcacttgctcaaactgccagacagccgtttcgcggtcagcgaagtgcttgacctgctggacgtgccggcagtgcgcgctcgctttggtattcgcgaaaacgacctgcccacgctacaccgctggatcgagggggccggcatacgctggggcctcaacgccgagcagcgggccagtcttggtttgcccgccgggctcgaacagaacagttggcgcttcggcctgcggcgtatgctgttgggctatgcagtgggtgtgggcgtggcctgtgacggcattgaaccctacgatgaaatcggtggcctggacgctgcactgatcggcccactggtcgcgctgctcgatgcgctcgaagtcgcctgtcaggccttgtccgagcccgccaccgtcacgcagtggggcgagcgcctgcatgctttgctacaggtgtttttcctggccgagggcgagcgtgacgagtacctgctgatgcaactgcaagatctgcgcgatagctggcttgaagtgtgcgagaccgttggcctgcaagacccgttgccgctggccgtggtgcgtgaagcctggctgtcgggcctcgatcagggcaagctgtcacagcgcttcttagccggctcggtgaacttctgcaccctgatgcccatgcgcgccatcccgttccgggtggtttgcctgctgggcatgaacgatggcgactacccgcgcgcccagcaaccgctggacttcgacttgatggccagcgactaccgccccggtgaccgctctcgccgcgaagacgaccgttacctgctgctggaggcgctgttgtcggcacgcgaccagctgtatgtcagttgggtcgggcgcagtatccgtgacaatagcgaacgcccggcctcggtactgatcggccagttgcgcgatcacatcgccacgggatggcatctggccggcatgcagcaggggcagccagccgaaccgggcgagcaactgctgcacgctctgactcaggagcatcccttgcagccgtttagcgcacgctacttccagaaaggcagcccgttgttcagctttgcccatgaatggcaactgctgcaccagcatggcgagacagatgaacagggcgagcccggcctgccgccatacctaggtgatgaagccctgagcctgacccaactgaatgactttctgcgccatccggtacggcactttttcagccagcgcttgaaggtgtactttgaagcgctggaagcaccaaccccggacgaagaacccttcgtcctcgatacgctgcaacgctatggcgccagtgaaagcctgcttggcgcagccttggccgagccggacaatgccgaacaggccttgcgtgcccaggcccggcgcctgcaggcctgcggtttgctgccgctggccggtttcggagaatcgctgcaaagcgagttgatcgaaccgctacccgatttgttgcaacgtcaccaacagctgctgcaacgctggcctcagctggtcgagggcgctttgccggtgcatttcgagcacgctcagcaccgtctcgaaggctggttgggccgggtgttccaggctcaggaccagagcctgctcagcatcaccacggtacccaacacaatcagcgccgggcgcaacaacctcaagtggcatcgtctgatcgcaccttgggttacgcacctggtcgcctgtgcggccggctatccctacaacagtgcactggtagccagcgacctgaccctgttacttgcaccgctaccgcaagcacaggctgctcagctgttgggcgacctgctggtggcccgtcaggcggcgatgaatgcgccgctgcccgtcgcggccaagaccgcgttcgcctggctggcccaggacgacgccgacaaggctttggccgccgcagcccgtgcctatgaaggcgacgagcgcaccagctttggcgagcgaagtgagagcatcgctctggcccgccagttccgcgactttgctgcactgacggctgacgaaacctttgaaggctggtgcgaaaccttgtaccgcccgttgttcaccgccccttggcagaccctgggcaacccggagaaaggcgcatga

SEQ ID NO: 157299 - protein, 1159 aa, Pseudomonas putida GB-1
MATTTLHPGFMIVHGNRLDDLRSLVVSWMRRYPLAPLENEIALVQSNGIAQWLKLALAEDPLEDDLGGCGIAAAIDVQLPGSFMWQLYRSVLGRDEIPEVSLLDKAPLTWRLMRLLPALIERPHFEPLRRFLTDDSDLRKRYQLAERLADLFDQYQVYRADWLKDWAAGEHVLNTARGERKALPPGNRWQAELWRALLEDVGEQGMAQSRAGVHQRFIERINSLEQAPAGLPPRVIVFGISSLPAQALEALAGLARFSQVLLCVHNPCRHHWADIVADKDLLRHQYKRQQRKQGMPLQLDDQSLHQHAHPLLAAWGKQGRDYINLLDSYDDPGSYQGVFSDGRIDLFSDGSPTTLLNQLQDDILELRPLTETRELWPPVDTAKDRSIRFHIAHSPQREVEILHDQLLARFSADATLRPRDVIVMLPAIDTYAPHIRAVFGQLQRNDPRYIPFTLTDQGQRGREPLLIALEHLLKLPDSRFAVSEVLDLLDVPAVRARFGIRENDLPTLHRWIEGAGIRWGLNAEQRASLGLPAGLEQNSWRFGLRRMLLGYAVGVGVACDGIEPYDEIGGLDAALIGPLVALLDALEVACQALSEPATVTQWGERLHALLQVFFLAEGERDEYLLMQLQDLRDSWLEVCETVGLQDPLPLAVVREAWLSGLDQGKLSQRFLAGSVNFCTLMPMRAIPFRVVCLLGMNDGDYPRAQQPLDFDLMASDYRPGDRSRREDDRYLLLEALLSARDQLYVSWVGRSIRDNSERPASVLIGQLRDHIATGWHLAGMQQGQPAEPGEQLLHALTQEHPLQPFSARYFQKGSPLFSFAHEWQLLHQHGETDEQGEPGLPPYLGDEALSLTQLNDFLRHPVRHFFSQRLKVYFEALEAPTPDEEPFVLDTLQRYGASESLLGAALAEPDNAEQALRAQARRLQACGLLPLAGFGESLQSELIEPLPDLLQRHQQLLQRWPQLVEGALPVHFEHAQHRLEGWLGRVFQAQDQSLLSITTVPNTISAGRNNLKWHRLIAPWVTHLVACAAGYPYNSALVASDLTLLLAPLPQAQAAQLLGDLLVARQAAMNAPLPVAAKTAFAWLAQDDADKALAAAARAYEGDERTSFGERSESIALARQFRDFAALTADETFEGWCETLYRPLFTAPWQTLGNPEKGA

SEQ ID NO: 157300 - DNA, 3675 bp, Marinobacter sp. ELB17
  CDS (1)..(3675): transl_table=11
atggccgctcctttaacaagtgccacccgtgataacccacatattacccccggttttcacgcgattcacgccaaccatctggaagacctgcgccgggccgtggtgtttatttgccaacaaaacccgttgccgccgctgcaaagcgagacgtttctggtgcaaagcaacggtattgcccagtggctaaagctggcgctggcggaaaagcgctcagagaatggcagcgaaggtggcttgggcattgccgccggtatggattttctgtttccggcgcgattcatctggcaggcctaccgcgccgtgctgccggacggcgacgtgccagagcaatccccctttgataaacgccggctggtgtggcggctttaccggctattaccagaacttgttcttaccgatgaggcgttcaacccgctggcgcgttttctggacggcagcgacaccgatttgcgggcattccagctggcagagaaagtggcggatctgtttgatcagtaccaggtgttccgcgctgattggctggctgcctgggagcagggccgggatgtggtgattagcacccgtaacggcgaaaaaccgattgaacaagatacccgctggcagccaatgctgtggcgcaagctggtggaagacaccggcgccgaagcacacaccagtcgctcgcagattcacacccgttttatgaaacagggccaacaggttgccgcgccttcccatccgagccgcttaccaaaacgcattgtggtgtttggtgtatcgtctttgccacgccaggcgcttgaggccctgtacgtgcttagccgttttagccaggtagtgctctgcgttcacaacccttcgcagttctactgggccgatattgtcagcgatcgcgaactgctcaaagctgagcgcaagcgcggtgccagccaccccacgctgtcgcagattgacgatgccgaccagttgcaccaacacgccaatccgctgttggcagcctggggtaaacagggtcgggattacattcgcctgctggacgaattcgacaatcccgacgagtaccgcaacagcttccagacgccggatcagaagatcgacattttttccgagcacggtgcaggtcagacaacctgcctgcttcaccaattgcagaacgatatttacaacctgacgccgctgcaagaaattcgcgatgaacaacgcaagcttgatctgagccaagggcatcctttaactgctgagggctctctgtccgctgagggctctctgtccgctgagggctctctgcctgctgagggctctttatcgtctgagggcttcccaaaagctgatggctccgttgccttccacaatgcgcacagcccacagcgtgaagtggaaatactgcacgaccagctgctggccgcgtttaacgccgatgacaccttgcgcccccgcgacatcatggtcatggtgcccgacatcaacgtgtatgcaccccacattcaggcggtgtttggccgctataccgccgggcgcaaacgccatattccgtttaccatttccgaccaaggccagcgcaaccacgaaccggtattgatagctctggaaaccctgatgtcgctgccgcgccaccgctttggggtgagcgaaatcatcagtctgttagaagtgcccggcattcgcgatcgttttgagattgccgaagaggaaatccccttggcgcggcgctgggtagaaggtgccaatattcgctggggcctgcacggtgcccaccgggaaagcctggaactgccagccgatctggaccgcaacacctggcaatctggcctgcgttccatgctgctcggttacggcatgggcgacgacgagccctgggctggcgttcagccctacggcgagattggcggtttgcaggccagcctggccgggcgccttggcgactttgtttaccgcctggaaaaagtgtggcaagacctacaggcaagccgcacaccgcaagaatgggaagcgctgtttgcagccatgcttgaacagtttttccacaaagtagaaggccatgaccttttgctgctgaaccgctttcgccgccaactggaacaatggctggacgacacattggccgctgggctggagcaccaactactgccattaaacattgtcaaagacgtgctattggacggcctggatgaaggcggcctgaaccagcgttttctggccggcaaagtgaacttcgccacactgatgcccatgcgcgccataccgttccgcactgtgtgcctgctgggcatgaacgacggcgattacccgcgctcgcggccgccggtagatttcgacctgatggcgcaggactatcggcccggtgaccgttcccgccgggaagacgatcgctatctgtttctggaagccatgctgtctgcccgcgaacagctttacatcagctgggtagggcgcagcattcgcgacgactcaccaaggccgccatcggtgctggtgggccaattgcaggatcacttgaacggcttgtggcaactgccagggcaacccgatgtcgcggtaaccgatgcactgactacctgccatccgctacaaccgttcagccgcgactattttccccaaagccgacacgcccgcagcttgttcacctacgaacacgaatggcgacgtgcccacggcactgtctcgacggacgcgcagcataaggctctggcgtaccagcagccggaagaacccgtcaccctgaatgacctgtccggttttttgaaaaaaccgatagacacgttttaccagcgccgccttcaggtgcgctttgaagacgtggaagacgacgataccgacaccgaaaactttgatttgaacggccttgaccgatggcgcctagacaccgaactgattgagcagggtttgctaaaagccagtagcgaggaagacttggaacaccgcctggaaaccaccctggattgcatggcccggcgcggtgacctgggcatgggcaccaccgagcaccggctgcgcaacgagctgtctggccgcctgccaaatttgttcgaacgttatcaaagcgcgctggccgaatggcccgaggaagtcggcgaaccgctggcgtttgaatatcgtctggccaacagcaccggctcggtggaggtgctggacctgattgatcacctgcgccgcaaccacgaaggcaatatctgccgactggtcatcgcgggctccagcctgctcactggcagcggcaataccaaaaaaattcgctacgccaatctgatgcgcgactgggtgattcacctggccgggcaaatcgcagcgcagccctttgaaaccctgattctgggcaaagaagaaaagcgcaatgtgcgcttcgcacctctggcaaaggaaacggcaagtaagcacctggacgccatattggcgcgctggatggacgccaacacgcgcgcattaccggtgcactgtgaagccggtttcgcctggatttacagcttttatcaaagcaaaaaatttcttggtgaacacgagcacgccatcagcgacgccgagcaagcttacacactggcgctagaacgcgacaccggctacctacgcggcgcctttgaaagcgctgaattattgctggaaagcggcgaatttgaagccctgctgcaccaactctatgtgcccctgtgggaagccgagcaaaacaaatccgccgctggtcaatttgaggacaaggtatga

SEQ ID NO: 157301 - protein, 1224 aa, Marinobacter sp. ELB17
MAAPLTSATRDNPHITPGFHAIHANHLEDLRRAVVFICQQNPLPPLQSETFLVQSNGIAQWLKLALAEKRSENGSEGGLGIAAGMDFLFPARFIWQAYRAVLPDGDVPEQSPFDKRRLVWRLYRLLPELVLTDEAFNPLARFLDGSDTDLRAFQLAEKVADLFDQYQVFRADWLAAWEQGRDVVISTRNGEKPIEQDTRWQPMLWRKLVEDTGAEAHTSRSQIHTRFMKQGQQVAAPSHPSRLPKRIVVFGVSSLPRQALEALYVLSRFSQVVLCVHNPSQFYWADIVSDRELLKAERKRGASHPTLSQIDDADQLHQHANPLLAAWGKQGRDYIRLLDEFDNPDEYRNSFQTPDQKIDIFSEHGAGQTTCLLHQLQNDIYNLTPLQEIRDEQRKLDLSQGHPLTAEGSLSAEGSLSAEGSLPAEGSLSSEGFPKADGSVAFHNAHSPQREVEILHDQLLAAFNADDTLRPRDIMVMVPDINVYAPHIQAVFGRYTAGRKRHIPFTISDQGQRNHEPVLIALETLMSLPRHRFGVSEIISLLEVPGIRDRFEIAEEEIPLARRWVEGANIRWGLHGAHRESLELPADLDRNTWQSGLRSMLLGYGMGDDEPWAGVQPYGEIGGLQASLAGRLGDFVYRLEKVWQDLQASRTPQEWEALFAAMLEQFFHKVEGHDLLLLNRFRRQLEQWLDDTLAAGLEHQLLPLNIVKDVLLDGLDEGGLNQRFLAGKVNFATLMPMRAIPFRTVCLLGMNDGDYPRSRPPVDFDLMAQDYRPGDRSRREDDRYLFLEAMLSAREQLYISWVGRSIRDDSPRPPSVLVGQLQDHLNGLWQLPGQPDVAVTDALTTCHPLQPFSRDYFPQSRHARSLFTYEHEWRRAHGTVSTDAQHKALAYQQPEEPVTLNDLSGFLKKPIDTFYQRRLQVRFEDVEDDDTDTENFDLNGLDRWRLDTELIEQGLLKASSEEDLEHRLETTLDCMARRGDLGMGTTEHRLRNELSGRLPNLFERYQSALAEWPEEVGEPLAFEYRLANSTGSVEVLDLIDHLRRNHEGNICRLVIAGSSLLTGSGNTKKIRYANLMRDWVIHLAGQIAAQPFETLILGKEEKRNVRFAPLAKETASKHLDAILARWMDANTRALPVHCEAGFAWIYSFYQSKKFLGEHEHAISDAEQAYTLALERDTGYLRGAFESAELLLESGEFEALLHQLYVPLWEAEQNKSAAGQFEDKV

SEQ ID NO: 157302 - DNA, 3393 bp, Moritella sp. PE36
  CDS (1)..(3393): transl_table=11
atgtttaatctttatcattcgaatcaattagatattttaaaagagctaatggctcactttattgcgaaagatccacttgccgacccttttgtcgaagagcaagttttggttcaaagtccaggtatggcgcaatgggtgaaaatggagttggcgaagtcgatgggcatatcggctaatattacctttccattgcctgcttcttttatttggaagatgttccaaaaggtattgcctgacattcccgacaaaagtgcatttaataaagaggcgatgtcttggaagttgatgctaatcctgcctgagttattagtgctagctgaattcgaatcattaaagcattatttagcggatgatcaagatgattaccggttatttcaactctgccaaaaaatatcggacacatttgaccaatatttagtgtaccgacctgagtggatcgcgggatgggaaggtggtgataatatgcatgccgatactcacccttggcagcccttactatggcgtgaattagttgctaaaacagaagtgttgggtcaatctcattatcatcgagccaacttatatgatcaatttatcgcacgcctcaatagttcaacttttgatgccaagctgctacctgatcgtatatttgtattcggggtatctgcattaccaccgcgttatttagatgcattacaagcacttgctatgcatactgaaatacattttatgttatcgaacccttgccgcttgtactggggtgatctgatagaccctaagtggctgttaaagcaacgtaccatggttaatcatcataatgtaacccttggcatgagtgataaggtgagtgccaatgatgaacaaaccgttcgcgctctctttgatgaagatgacgcatttaaagtgggtaatccactactcgcgtctatgggcaaactgggtcgcgataatttagcgttattgacgggttttggttgtcaggagctagatgtttttgtggaaccgaccgatgatggactacttgcaagtattcagcgcgatattttagatttggctgatcgcagtatggcagagtttaatgtttcgcaacaggataccaatacacgcgatagtcgttataaactccctattaatcctgcagactcttcacttgaactgcacagctgtcatagcccaatgcgtgaaatagaagtattacataataatttgctcactatgttttcggaaaatccagatcttaatccccgagatgtggttatcatgatgcccgatgtaaatggttacagtccttatattcaagcggtgtttggtgcgatggaccgttatgatgaacggtatattccgttttctatctcagatagtggcgcgcagtatgataatcctattttactcagctttttacaattactgacgctacctttatcgcgttgtaacgtctctgaattactgtcgttactggaggtacctgcggtattagcgcgttttgctattacgcctgatgagtttaaccgattacgtcaatggattgatgaatctggtattcgctggggcttagatgaagatgatgccactcgttttgacttacctgggatgaaacaaaatacttggttatttggtttacaccgcatgttgctcggttacgcttatggtggtgatgatatttatcaaggcatattgccttatcaagaagtacaggggattgaagctgaactactgggtaaattagcgcactttattgaagcattattagatagtcttacctcattacaagatccgaaatcgatagcagactggatcaagttaggtaatacgctgatagataatttttataaaattgatgtggatgatgagcaatcaataaaaatgatccgagatgctttttcacatttagatgagcaattaaaaagtgccagttatgacaaacacatcactccgttagtattacgtcattatttaaataatgcgttatcacaagttggtgccagtcaaaaatttctcgcgggtcaagttaatttttgtaccctaatgccgatgcgttcaattccgtttaaagttatctgtttactcggtatgaatgatggtgtttatccacgctcaattccgccaatgggttttgatttaatggccaatgatcttaaacaaggtgatcgtagccgtcgtgatgatgatcgctatttatttttggaagcgctcatttcagcccaaagtaaattatatattagctatattggcagtagtattcgtgataagagtgagcgtctaccgtctgtgttgatcacggagttattacaatattgtcagcaaagtttttgtattaccggtgatgagggtctatctcctgatgagtctgctgcacaattactgacgcatttaatccagcatcatgctttacagccattcgatgcacgctattttaatccgcaagcaccgacctcttttgccaaagagtggttacctgcgttagcccctgttgtggagttaagacaatttctaactgagcctttacctgcgctaatatccaatgatgatatgcaagaggtagagctagctgaactattacgtttttatcgccatccgactaagtacttctttaaccgacgtttaaaagtttattttaatcaggccagccttgatgtgcttgatgacgaaccatttgatgtcgataacctagaaaaatatcatcttaaagcgcaattactggaaacggaattgatgggcggcgacattagtctggtgactgaacggttggttgcatcaggtagtcttcctcttggacgttttggcaaaatttcactagataaagaagtcagtactgttagtcagcttgctcaggtattaatgccgttattaaccaatagtaatgatgatatcgaggtcgacattcctttggtttctggacgtttatttggttggttaaaacacatatataacggtggtttagtacgacataagccgagtggctttaatggtaaagattatctgcaggtttggttagaacatttatgtttctgtattagcattaaaaatccagcggcgacaacgcttgtccacttaacagcgggtaaacccgttgtgcaacgacttagagtcattgatcaatctcgagcgagagaattactatttcaattatttgaggtttataacgatggctgctgccagcctttggcgttattccctaaaactggctggggttgggcaaaaaccaaatgtacaaccgcagcgcttgatgattataaattaagagcggaagctgtattgaatttcgaaggtggctataaccgtatgggtgaaaatgccgatgactatttacaacgtagctttccacgcttaaatgatgaggtatataaattaatgtctgcatcttcagagtctgtgttatttccaatctttgaatatctagaggatgttgaataa

SEQ ID NO: 157303 - protein, 1130 aa, Moritella sp. PE36
MFNLYHSNQLDILKELMAHFIAKDPLADPFVEEQVLVQSPGMAQWVKMELAKSMGISANITFPLPASFIWKMFQKVLPDIPDKSAFNKEAMSWKLMLILPELLVLAEFESLKHYLADDQDDYRLFQLCQKISDTFDQYLVYRPEWIAGWEGGDNMHADTHPWQPLLWRELVAKTEVLGQSHYHRANLYDQFIARLNSSTFDAKLLPDRIFVFGVSALPPRYLDALQALAMHTEIHFMLSNPCRLYWGDLIDPKWLLKQRTMVNHHNVTLGMSDKVSANDEQTVRALFDEDDAFKVGNPLLASMGKLGRDNLALLTGFGCQELDVFVEPTDDGLLASIQRDILDLADRSMAEFNVSQQDTNTRDSRYKLPINPADSSLELHSCHSPMREIEVLHNNLLTMFSENPDLNPRDVVIMMPDVNGYSPYIQAVFGAMDRYDERYIPFSISDSGAQYDNPILLSFLQLLTLPLSRCNVSELLSLLEVPAVLARFAITPDEFNRLRQWIDESGIRWGLDEDDATRFDLPGMKQNTWLFGLHRMLLGYAYGGDDIYQGILPYQEVQGIEAELLGKLAHFIEALLDSLTSLQDPKSIADWIKLGNTLIDNFYKIDVDDEQSIKMIRDAFSHLDEQLKSASYDKHITPLVLRHYLNNALSQVGASQKFLAGQVNFCTLMPMRSIPFKVICLLGMNDGVYPRSIPPMGFDLMANDLKQGDRSRRDDDRYLFLEALISAQSKLYISYIGSSIRDKSERLPSVLITELLQYCQQSFCITGDEGLSPDESAAQLLTHLIQHHALQPFDARYFNPQAPTSFAKEWLPALAPVVELRQFLTEPLPALISNDDMQEVELAELLRFYRHPTKYFFNRRLKVYFNQASLDVLDDEPFDVDNLEKYHLKAQLLETELMGGDISLVTERLVASGSLPLGRFGKISLDKEVSTVSQLAQVLMPLLTNSNDDIEVDIPLVSGRLFGWLKHIYNGGLVRHKPSGFNGKDYLQVWLEHLCFCISIKNPAATTLVHLTAGKPVVQRLRVIDQSRARELLFQLFEVYNDGCCQPLALFPKTGWGWAKTKCTTAALDDYKLRAEAVLNFEGGYNRMGENADDYLQRSFPRLNDEVYKLMSASSESVLFPIFEYLEDVE

SEQ ID NO: 157304 - DNA, 3195 bp, Geobacter sulfurreducens; identical to SEQ ID NO: 157190
  CDS (1)..(3195): transl_table=11

SEQ ID NO: 157305 - protein, 1064 aa, Geobacter sulfurreducens
MPLTIYTSNRMEALVEQLCAVVEPPLSSPFVPETIVVQSRGMERWLAMELAKRLGIWANGSYPFPNAFVWSLFRAALPHLPDQSPFDPAILTWRIMDLLPRLLPEPAFGQLRGYLAGEDRELRLYQLAARIADTFDQYTVFRGDLLATWETGRDQQWQARLWRALTADSPGTHRGAVRDAFLKQLAGGRLPAGVCPERVSVFGISYLPPFHLEIFTSLARLCPVNLFVLSPCREYWGDIVSPGARARMTPERRQQAVEGHPLLASLGKPGRDFSSLILACDDLSGGERDLYADAPGETLLAAVQNGILTLDEADGTPRLVRVDPGDRSIGIHSCHGPMREAEVLHDVLLAMFEDLPGLTPRDILVMTPDIETYAPYVAAVFGGGQDQRRRIPFSIADRSIRSAGGAADAFLAILDLPLGRFPATGVLDILETGAVHRRFGIDEAGLEQIRSWVEATRIRWGMDENERRAAGLPAYRENSWQAGLDRLLLGVAMPDEEGAMFGGILPHDAMEGDGPVLLGRFIRFVEALERVRQDLARPRSLEGWTATLRGILADFFNPDDATAFERAALGRIVDGLGELGAGSGFTDEVGRSVIRAWLGERLDRPDQGLGFMTGGVTFCAMLPMRSIPFRVICLLGVNDDSFPRRDRAAGFDLMAADRRPGDRSLREEDRYLFLEALLSARERLVISYTGQSVRDNAELPPSVLVSEFLDYLGSRFTDGTDRFPASLVTRHRLQPFSPAYFTGDGGLFSYAAEECRALSRRGRDDAPRPFLEHPLAESGPASADETEILPLAQLISFFEHPVRYLMRHRLGIRLEESRSPLEDREPFALDSLDAFLLEQEILDHILAGGDPADLLPVARARGGLPPARQGELAFAGLTARVRDLADRVRPATNGQPPLEPLTVDLRVGERRLVGELGSLWPAGLIRWRCARLSGRDHIRLWIEHLVFNALALPATGAASRLLAADGDLALRPVADPLAHLEALVSYYGQGSREPLRFFPRSSLAFARTGEMAAARTTWGGDFYPEGDDPYYALCFGTADPLDDAFRETSVAILTPLLAHREDER

SEQ ID NO: 157306 - DNA, 3450 bp, Pseudomonas syringae
  CDS (1)..(3450): transl_table=11
atgccggttgctacgtccctcaatgcgggttttatggtggttcacggtaaccgccttgatgagttgcgcagcctggttgtgagctggatgcgccgctaccctctggctcctttggagaacgaaattgctttggtgcagagcaacggtatcgcccaatggctgaagctggctctggcggaagatgcccgggacgatgaccttggcggctgtggtattgccgccgcggtagacgtgcagttgcccggcagtttcatgtggcaactttatagagtcgtcctgggcagtgaacaaatccctgcaacgtccctgctcgataaagccccgctgacctggcgcctgatgcgcttgctcccggcgcttatcgatcagccgcacttcgaacccttgcagcgcttccttacccatgacagcgatctgcgcaaacgctatcagctgtcagagcggctggctgacctgttcgaccaatatcaggtttaccgggccgactggctggaagattgggccgcaggccgccatcaattgcgcaacgcccggggtgaaagtccggccctgagcccggctaactgctggcaggccgaactctggcgtgcgttattgctcgatgtgggtgaggagggcatgtcccagagtcgggccggtgttcaccagcgcttcatggataagatcaacagccttgagcaagcgccgcccggtctaccggccagggtgattgtattcgggatttcttcactgcccgcccaggcgctcgaagccctggccggactttcccgtttcagccaggtgctgctgtgcgtacacaacccttgtcgccatcactggtcagacatcgttgcggataaagacctgctgcgtcaccagtacaaacgtcaggcgcgcaaagcgggaatgcctgcagccctggacctggatatcctgcatcaacacgcccacccgttgcttgcagcctggggcaaacaagggcgtgactacatcaatctgctcgacagctacgatgaccccaatagttatcgcgctgcttttcgtgatggccgtatcgacctgttcagtgaggtgcaaccgctgaaccagctgaaccagttgcaggatgacatcctcgaactgcgccccctaagcgaaacccgcgagttatggcccgccgtcgatttggatcaggatcaatcaatccgcttccaggttgcccacagtgcgcagcgcgaagtcgagatccttcacgaccaattgctcgcccgtttcgcaaaatatcctcagttgcagccgcgggatgtgatcgtgatggtgccggatatcgacagctacgcgccccatatccgtgcggtatttggccagatcgagcgagacgaccgccggctcatcccctacaccctggcagaccagggccagcgtggccgtgatccgctgctgatcgccatcgagcatctgctcaagctgccggacagccgttttcccgtcagtgaaattctcgacttgctggatgttcctgccctgcgcgcacgcttcaacgtacaagagcgcgacttgccgaccctgcatcgctggattgagggtgcggggattcgttggggactgaatgctgagcaacgggccggcctcggtttgccggctcatctggaacaaaacagttggcgctttggcctgcgccgcatgttgctcggttatgccgtcggcagcgccgaagcctgcgatggcattgagccttatgatgaaattggcggtctcgatgcggtactgatcggccccctcgtggcattgctggacgcactggaaattgcccaccaggagctgtcccgaccggctttgccggggcaatggggcgagcgcctgcaggcattggtgcaactgtttttccaggcagaaaccgaacatgacgattacctgctggcccagctcgaagagcttcgcgaaacctggctcgagacctgtgagctggtcggtctgcaagacgagttaccgctaaccgtagtacgtgaagcctggttggccgggcttgatcaaggcaagctgtcgcagcgctttttggccggggcggtgaatttttgcaccctgatgccgatgcgggccattccgttcaagctggtatgcctgttgggcatgaacgatggcgactacccgcgtgcgcaaccaccgcttgatttcgacctgatgggcagtgactaccgcccgggtgacagatcccgccgggaagatgaccgctacctgctgctcgaagcgctgctttctgcacgggatcagctctatatcagctgggtcgggcgcagtattcgcgacaacagcgagcgtcctgcctgcgtattgatcgggcaactgcgcgaccacctggccagcggctggcaactggcgggcgggggtgacttgctgcaagccatgacccaggaacatccgcttcaacccttcagtacccgctatttccatgaaggtaattccaacctgttcagctatgcccgggaatggcagcgtttgcacgagccccaaccggcacctgttgcgccgggcatcctgaccgcgcacgaacaagaagaacctttgaacctgacccaactgcaggacttcttgcgtaatcctgtacggcacttctttagccaacgtttgaaagtgttctttgaggcggccgaagtgcctctggcagatgaggaacccttcgtactcgacgcgttacagcgctacaccctgagcgacagcttgctcgaagccgcattggcgcagccagaccagcctgaacaggccttgcatacccgggccctgcgtttacagggcagcggtctgctgcccatggccggttttggcgagagtctgcagcaagaactgatagagccacttccagatgtactacagcgctatcagcaattacttgccctttggcctacgccgctcaatagcgcgcttcccgtcagctttgagtcaaacggcctgactctggaaggctggctgagcaatctgcatcaacgcagtgacaagggcctactgtccgtcacgactattcctaacagtattggcgcgatcaaaacccgtaaatggcatcgcttgacccggccctgggtcaaccatctggtcgcttgcgccagtggcctggacatgtccactgcgttggtagccagcgatgacaccttgctgctcgcgcctctggaggccaagcacgccagtgaaattcttggcaacttgctgatggcctggaaagtcggcatgggccgcccgttacccattgcggtcaaaacagccttcgcctggctggcccagaccgatccggccaaagccgatgccgcggcgcaaaaagcctacgaaggtgacggccagaccagcgatggcgagcgtcgcgaaagtgccgcactcgcacgccagttccctgattacccggccctgatggccagtgaagaatttgcagagtggtgcgatgccctctatcgaccactctttgatgcgccatggcgttcattgaacagcgaggcgtcccgctaa

SEQ ID NO: 157307 - protein, 1149 aa, Pseudomonas syringae
MPVATSLNAGFMVVHGNRLDELRSLVVSWMRRYPLAPLENEIALVQSNGIAQWLKLALAEDARDDDLGGCGIAAAVDVQLPGSFMWQLYRVVLGSEQIPATSLLDKAPLTWRLMRLLPALIDQPHFEPLQRFLTHDSDLRKRYQLSERLADLFDQYQVYRADWLEDWAAGRHQLRNARGESPALSPANCWQAELWRALLLDVGEEGMSQSRAGVHQRFMDKINSLEQAPPGLPARVIVFGISSLPAQALEALAGLSRFSQVLLCVHNPCRHHWSDIVADKDLLRHQYKRQARKAGMPAALDLDILHQHAHPLLAAWGKQGRDYINLLDSYDDPNSYRAAFRDGRIDLFSEVQPLNQLNQLQDDILELRPLSETRELWPAVDLDQDQSIRFQVAHSAQREVEILHDQLLARFAKYPQLQPRDVIVMVPDIDSYAPHIRAVFGQIERDDRRLIPYTLADQGQRGRDPLLIAIEHLLKLPDSRFPVSEILDLLDVPALRARFNVQERDLPTLHRWIEGAGIRWGLNAEQRAGLGLPAHLEQNSWRFGLRRMLLGYAVGSAEACDGIEPYDEIGGLDAVLIGPLVALLDALEIAHQELSRPALPGQWGERLQALVQLFFQAETEHDDYLLAQLEELRETWLETCELVGLQDELPLTVVREAWLAGLDQGKLSQRFLAGAVNFCTLMPMRAIPFKLVCLLGMNDGDYPRAQPPLDFDLMGSDYRPGDRSRREDDRYLLLEALLSARDQLYISWVGRSIRDNSERPACVLIGQLRDHLASGWQLAGGGDLLQAMTQEHPLQPFSTRYFHEGNSNLFSYAREWQRLHEPQPAPVAPGILTAHEQEEPLNLTQLQDFLRNPVRHFFSQRLKVFFEAAEVPLADEEPFVLDALQRYTLSDSLLEAALAQPDQPEQALHTRALRLQGSGLLPMAGFGESLQQELIEPLPDVLQRYQQLLALWPTPLNSALPVSFESNGLTLEGWLSNLHQRSDKGLLSVTTIPNSIGAIKTRKWHRLTRPWVNHLVACASGLDMSTALVASDDTLLLAPLEAKHASEILGNLLMAWKVGMGRPLPIAVKTAFAWLAQTDPAKADAAAQKAYEGDGQTSDGERRESAALARQFPDYPALMASEEFAEWCDALYRPLFDAPWRSLNSEASR

SEQ ID NO: 157308 - DNA, 3366 bp, Escherichia coli
  CDS (1)..(3366): transl_table=11
atgttaagggtctaccattccaatcgtctggacgtgctggaagcgttgatggagtttattgtcgaacgcgaacggctggacgatcctttcgaaccagagatgattctggtgcaaagtaccggtatggcacagtggctgcaaatgaccctgtcgcaaaagtttggtattgcggcaaacattgattttccgctgccagcgagctttatctgggatatgttcgtccgggtgttaccggaaatccccaaagagagcgcctttaacaaacagagcatgagctggaaactgatgactctgctgccgcaattgctggagcgcgaagactttaccctgttgcggcattatctgactgacgatagcgacaagcgaaaactgttccagctttcctcaaaagcggcggacctgtttgaccagtatctggtctatcgtccggactggctggcacagtgggaaacaggacatttggttgaagggctgggagaagcacaggcctggcaagccccgttgtggaaggcgctggtggaatatacccatcaactcgggcaaccgcgctggcaccgcgccaatctctatcagcgctttatcgaaacgctggagtccgcgacgacctgcccgccggggttaccttcgcgcgtctttatatgcggtatttccgcgttaccgcctgtttatctccaggcgctacaggcgctgggtaaacatattgaaatccatctcctgtttaccaacccctgccgttattactggggcgatattaaagatcctgcttatctggcgaaactgctgacccgtcagcgtcgacacagttttgaagatcgcgaattgccgctatttcgtgatagcgaaaatgccgggcagctctttaacagcgatggtgaacaggatgtcggcaacccgctgctggcttcatggggtaagcttgggcgcgactacatttatctcctttctgacctggagagcagccaggagctggacgcctttgtcgatgtcacgccagataacctgctgcataacattcagtctgacattctggaactggaaaaccgcgccgttgctggtgtgaacatcgaagagttttcccgtagcgataacaaacgcccgcttgatccactggatagcagtatcaccttccacgtttgccatagcccgcagcgtgaagttgaagttttacacgatcgcctgctggcgatgctggaggaagacccgacacttactccgcgcgacatcatcgtgatggtggctgatatcgacagctacagtccgtttattcaggctgtgtttggtagcgcacctgcggatcgttacctaccttacgccatttccgaccgtcgtgcgcggcagtcacatccggtactggaagcgtttatcagcctgttatcactgcctgacagtcgttttgtgtcagaggatgtgctggcgttgctggatgtgccggtgctggcggcgcggtttgacatcaccgaagaagggctgcgttatttacgccagtgggtcaacgaatccggcattcgttggggcatagatgacgacaacgttcgcgagctggaactccccgccaccggacaacacacctggcgatttggcctgacgcgtatgttgttgggctacgcgatggagagcgcgcagggcgagtggcaatcggttctaccttatgatgaatcgagcggcttaattgcagaactggtggggcatctggcttcactgctaatgcagctaaacatctggcgtcgcgggctggcacaggagcgtccgctggaagagtggttgccggtttgtcgcgatatgctcaacgccttcttcctgccggatgcggaaaccgaagcggcgatgacgctgatcgaacaacaatggcaggcgattatcgccgaaggtttaggtgcgcagtatggcgacgcggtgccgctgtcactattgcgtgatgaactggcacagcgtctggacaagaacgtatcagccagcgttttcgccggaccggttaacatttgtactctgatgccaatgcgttcaattccgttcaaagtggtttgcctgctgggaatgaacgacggcgtttatccacgtcagcttgcgccattgggctttgacctgatgagccagaaaccgaagcgtggcgaccgtagccgtcgcgatgacgaccgctatctgttcctggaagcgttaatttccgcgcagcaaaaactctatatcagctatatcggtcgttccattcaggataacagtgagcgtttcccgtcggtactggtgcaggaactgatcgactacatcgggcaaagtcattatctaccgggcgatgaagcgctcaactgtgatgaaagcgaggcaagggtaaaagcgcatcttacttgcctccatacccggatgccgtttgatccacaaaactaccagccaggcgaacgacaaagctatgctcgtgaatggctacctgcggccagccaggctggtaaagcacattctgaatttgttcagccgctgccgtttaccttaccggaaaccgtgccgctggaaacgctacaacgattctgggcacatccggtgcgggcatttttccagatgcgtttgcaggtgaacttccgtactgaagacagcgaaatccccgacaccgagccatttattctggaaggacttagccgttatcaaatcaatcagcagttattgaatgcactggttgagcaggatgatgccgaacgcttgttccgccgcttccgagcggcaggggatttaccgtatggcgcttttggtgaaattttctgggaaacacagtgccaggagatgcagcagcttgccgacagagtcattgcctgtcgccagccggggcagagtatggaaattgatctcgcctgcaacggtgtgcagataactggctggttgccgcaggtgcagccggatggcctgttgcgctggcgtccctctttattaagtgtggcccagggaatgcaactttggctggaacaccttgtctactgtgccagcggtggtaatggtgaaagtcgcctttttctacgcaaagacggcgagtggcgttttccgccgcttgcagccgaacaggctttgcattacctctcacaactgattgaggggtatcgtgaaggaatgtccgcgccattgctggtgttacctgaaagtggcggcgcgtggctaaaaacctgttatgacgcgcaaaacgatgccatgctggatgacgattccacgttgcaaaaagcccgtacgaaattccttcaggcttacgaaggcaacatgatggtgcgtggcgaaggtgatgatatctggtatcaaaggctctggcggcaattaacaccagagacaatggaggccatcgttgaacagtcgcaacgtttcctgttaccgctgtttcgctttaatcagtcatga

SEQ ID NO: 157309 - protein, 1121 aa, Escherichia coli
MLRVYHSNRLDVLEALMEFIVERERLDDPFEPEMILVQSTGMAQWLQMTLSQKFGIAANIDFPLPASFIWDMFVRVLPEIPKESAFNKQSMSWKLMTLLPQLLEREDFTLLRHYLTDDSDKRKLFQLSSKAADLFDQYLVYRPDWLAQWETGHLVEGLGEAQAWQAPLWKALVEYTHQLGQPRWHRANLYQRFIETLESATTCPPGLPSRVFICGISALPPVYLQALQALGKHIEIHLLFTNPCRYYWGDIKDPAYLAKLLTRQRRHSFEDRELPLFRDSENAGQLFNSDGEQDVGNPLLASWGKLGRDYIYLLSDLESSQELDAFVDVTPDNLLHNIQSDILELENRAVAGVNIEEFSRSDNKRPLDPLDSSITFHVCHSPQREVEVLHDRLLAMLEEDPTLTPRDIIVMVADIDSYSPFIQAVFGSAPADRYLPYAISDRRARQSHPVLEAFISLLSLPDSRFVSEDVLALLDVPVLAARFDITEEGLRYLRQWVNESGIRWGIDDDNVRELELPATGQHTWRFGLTRMLLGYAMESAQGEWQSVLPYDESSGLIAELVGHLASLLMQLNIWRRGLAQERPLEEWLPVCRDMLNAFFLPDAETEAAMTLIEQQWQAIIAEGLGAQYGDAVPLSLLRDELAQRLDKNVSASVFAGPVNICTLMPMRSIPFKVVCLLGMNDGVYPRQLAPLGFDLMSQKPKRGDRSRRDDDRYLFLEALISAQQKLYISYIGRSIQDNSERFPSVLVQELIDYIGQSHYLPGDEALNCDESEARVKAHLTCLHTRMPFDPQNYQPGERQSYAREWLPAASQAGKAHSEFVQPLPFTLPETVPLETLQRFWAHPVRAFFQMRLQVNFRTEDSEIPDTEPFILEGLSRYQINQQLLNALVEQDDAERLFRRFRAAGDLPYGAFGEIFWETQCQEMQQLADRVIACRQPGQSMEIDLACNGVQITGWLPQVQPDGLLRWRPSLLSVAQGMQLWLEHLVYCASGGNGESRLFLRKDGEWRFPPLAAEQALHYLSQLIEGYREGMSAPLLVLPESGGAWLKTCYDAQNDAMLDDDSTLQKARTKFLQAYEGNMMVRGEGDDIWYQRLWRQLTPETMEAIVEQSQRFLLPLFRFNQS

SEQ ID NO: 157310 - DNA, 3258 bp, Mycobacterium smegmatis
  CDS (1)..(3258): transl_table=11
atggcactgcacctgcatcgggccgaacgcaccgatctgctcgctgatggactcgcggcgctgctgtcggatcccctgcccgatccgttcgcgaccgaactggtgctggtccctgccaagggcgtcgaacgctggctgagccagcggttgtccaaccgtctcggggtgtgcgcggcggtcgagttccgcaacccgcgctcgctcatcgccgagctcaccggaaccgccgacgacgatccgtggtcacccgacgcgatggtgtggccgctgctcggcgtgatcgacgagagcctcgacgagccgtggtgcgcgacgctcgcgacgcacctcggccacttcgagatgggcgaggagtacgagctgcgccagggccgccgctacgcggtcgcgcgacggctggcggggttgttcgcgtcctacgcgcggcagcgcccgcaactactggtcgactgggacggcctccccgacgacctggcctggcagaaagcgctgtggcaggcactgtgtgagcgcatcgacgccgacccgccccacatccgccacgccaaaacccttgtccagctacatgagtcgcccacggatctgccgcagcgcctgtcgctgttcgggcatacacgcctgcctgccaccgaggtcgaattgctgaccgcgctggccacgcatcacgatctgcacctgtggctgccccaccccagcgacactctctggcaggcactgtccacgcgcaagggtccgctgccccgacgtgaggacaccagccaccgtgacgtcgggcatccactgctggccaccctgggccgcgacctgcgcgagatgcaacgtctgctgcccgagcccgacaccgacgaattccgcggcaggtccgagtatcccgacacgctgctgggctggctgcagtccgacatcgcggccgacgcggtacgcccgcagggccgtcaccaccgtcgcgaggaccgctcgatccaggtgcacagctgccacggcccgtcacggcagatcgatgtgctgcgcgaggtgctgctcggcctgctcgccgacgatcccacgctggaaccccgcgacatcctcgtcatgtgtcccgacatcgagacctacgcgccgttgatcacggccgggttcgggctcggcgacgtcgtgccgcgcacgcgaggagcacatataaatctcagcgcgcatcccgcgcacaagctgcgggtgcggctggccgaccgcgcgctggtgcagaccaatcccctgctggcggtggccgcgcaactgctggcgctggccggcggccgcgcgaccgcgagcgaggtgctcaacctggccgaatccgcgccggtgcgggcccggttcggattcaccgacgacgacctcgacgcgatcacggcgtggacgcgcgaggccaacatccgctggggtttcgaccaggagcaccgccgcccgtacggcgtcgaattcctgcacaacacctggcgtttcggcatcgaccgcgtgctggccggggtcgccatgtccgacgactcgcatgcctggctgggcacgacgctgccgctcgacgacgtcagcagcaaccgcgtggagttggcgggccggttcgccgatttcgtcgagaagctccgccgcacggtcgatcagctcagcggcacccgcccgctgcacgagtggctcgacgcgctgaccgcgggcatcgacgcgctggcactggccgacgaggactggcccgccgcccagatgcagcgtgagttcgccgagatcaccgcacgtgcgggcgacaccgcaacctcgttgcggctggcggatgttcgcgcactgctggaccgccatctggccgggcgccccacgcgggccaacttccgcaccggaacgctcacggtgtgcaccatggtgccgatgcgttcggtgccgcaccgcgtggtgtgcctcgtgggtctcgacgacggcgtgttcccgcgtctgggggcggtcgacggcgacgacgccctcgcgcgcgacccgatgaccggtgagcgtgacattcgttcggaggatcgccaactgctgctcgacgcgatcctcgcggccacgcagacgctcgtcatcacctacaccggcgccaacgaatactcggggcaggcccgcccgcccgcggtcccgctggccgagctgatcgacacgctcaagatcaccaccgaagattccgcactcgacgtcctcacgcggcatccgttgcagcccttcgacaaacgcaacgtgatccctggcgcgctggtgccggacgagccgttcacgttcgaccagaccgcgctcgtcgcggcacgggccagcagtggtgaacgcgccatgcggccggcgttcttcagcgatccgttgccgccgccgctgcccgacgacgtcgccctcgaagacctgctgaacttcttcaaggatcccgtcaaggggttcttccgcgcgctcgactacacgctgccatgggacgtcgagggcgtgtccgacgtgatgcccgtcgacatcgacgcactcgaggaatggacggtcggcgaccgcatgctgtcggacatcctgcgcggcatgaccccggccgccgcgcaacaggccgagtggcgccgtggcacgctgccgcccggacagttgggatggcgccgcgcgatcgcactgcgcgaccagtgcgcgctgctggccgccgaggcgctggggttccgcgacaccgacggtcaggcctacgacgtcgacatcgacctgggcggtggccggcgtctcaccggcacggtgtcaccggtgttcggtgaccgactggtgtcggtgacgtactccaagctgggcggcaagcacttgctgcagtcgtggattccgttgctggcgttggccgccggatatcccgaccgcgactggctcgcggtgtgcatcgggcggcccgcgcggggcaccacaccgcgggtcgaggggctgggcgggcccgacaacccggtcgatctgctggcggatctggtggcgatctacgacgcggggcggcgcgaaccactgccgcttccggtcaagacgtcgtatgcgtgggccgaggcacggcactgcggcgacgatccggagcagaaggccggcttccgctggcgcagcggccgatacccgggcgaggacgccgaacctgcccacgtgcgcgcgtggggccgtgacgcgtggctgcgcgacctcatgcaaccgctgcgccccggtgaggagttcgaaggcgaaacccaccggttaggtgcgtactcgtcacggctgtggctgccgctgctgcgcgccgaaaggccggtgcggtga

SEQ ID NO: 157311 - protein, 1085 aa, Mycobacterium smegmatis
MALHLHRAERTDLLADGLAALLSDPLPDPFATELVLVPAKGVERWLSQRLSNRLGVCAAVEFRNPRSLIAELTGTADDDPWSPDAMVWPLLGVIDESLDEPWCATLATHLGHFEMGEEYELRQGRRYAVARRLAGLFASYARQRPQLLVDWDGLPDDLAWQKALWQALCERIDADPPHIRHAKTLVQLHESPTDLPQRLSLFGHTRLPATEVELLTALATHHDLHLWLPHPSDTLWQALSTRKGPLPRREDTSHRDVGHPLLATLGRDLREMQRLLPEPDTDEFRGRSEYPDTLLGWLQSDIAADAVRPQGRHHRREDRSIQVHSCHGPSRQIDVLREVLLGLLADDPTLEPRDILVMCPDIETYAPLITAGFGLGDVVPRTRGAHINLSAHPAHKLRVRLADRALVQTNPLLAVAAQLLALAGGRATASEVLNLAESAPVRARFGFTDDDLDAITAWTREANIRWGFDQEHRRPYGVEFLHNTWRFGIDRVLAGVAMSDDSHAWLGTTLPLDDVSSNRVELAGRFADFVEKLRRTVDQLSGTRPLHEWLDALTAGIDALALADEDWPAAQMQREFAEITARAGDTATSLRLADVRALLDRHLAGRPTRANFRTGTLTVCTMVPMRSVPHRVVCLVGLDDGVFPRLGAVDGDDALARDPMTGERDIRSEDRQLLLDAILAATQTLVITYTGANEYSGQARPPAVPLAELIDTLKITTEDSALDVLTRHPLQPFDKRNVIPGALVPDEPFTFDQTALVAARASSGERAMRPAFFSDPLPPPLPDDVALEDLLNFFKDPVKGFFRALDYTLPWDVEGVSDVMPVDIDALEEWTVGDRMLSDILRGMTPAAAQQAEWRRGTLPPGQLGWRRAIALRDQCALLAAEALGFRDTDGQAYDVDIDLGGGRRLTGTVSPVFGDRLVSVTYSKLGGKHLLQSWIPLLALAAGYPDRDWLAVCIGRPARGTTPRVEGLGGPDNPVDLLADLVAIYDAGRREPLPLPVKTSYAWAEARHCGDDPEQKAGFRWRSGRYPGEDAEPAHVRAWGRDAWLRDLMQPLRPGEEFEGETHRLGAYSSRLWLPLLRAERPVR

SEQ ID NO: 157312 - DNA, 3366 bp, Haemophilus influenzae
  CDS (1)..(3366): transl_table=11
gtgttcattgtttattattccaatcagcttgaaaaacaaaaagaaattctttcttccctattcaaatctttaccgcctgaagatccttttcaacaagatattatcttggtacaaagccctaatatggcgcaatggctacaaattgaacttgccaaagaaacaggtatttcagcaaacctaaaatttcctatgccagccagttttatttggcaactttatgcacaaaatttacctgcaacggcattagagaacccttttgataaagattcaatgatgtggcgtttaatgcgcttaatcccaatttttcttgagaaagaaaatttttcgcctctacgtaattatttatcatcttcgccacattctgaacaatataaactttatcaactcagcagtaaaatagccgacttatttgaccaatatttagtttatcgacctgaatggatttttgcttgggaaaaaggcgaagatgaacaaatcactgatcaaatacaaaaacaacaacctaacctaaacgcaactttgtttgcgcaaattcaaggcaatacaaaatggcaaggtgagttatggcgtgcgttggtcgtcgatgttaaatcagatgttaatgaagccacccatcgagcagctttgcataatcaattcttagccttgcttgccgataaaaaagcaccgaaaaaattaccttcacgcatatttatttttggtattcctgcgcttccaactgcttatctcaatattttgcaagcgatatcctctgaagtggatattcatttattttttaataatccttgccaagaatattggggggatattagtgatttacgccttgattatttgcgttctcgtcagcgttatcaattcaataaacaagatgaaaatcaaccgctcttttccgaggatcaactttctcaactagaaaacgctcagtttgacgtcacttatcaaaaagaaaaccttcaactaggcaatccattactggcggcttggggaaaaatgggacgagattttctctatatattggtgagagatgaagaacatattccaacttatcccgtcaatgcctatcaagaaattgagtcaaacagtttactcggacaattacagtctcaaattctgcatttagaaaataaaccgttaaatatcgcaaaaaatgaccgcactttaaccctacattcttgccacagtgctatgcgagaagtggaagtattgcacgactatttactggatttattcaatcaagatcctagtcttacgccaaaagatgtggttgttatggtggcagatattaaccaatacacaccctatattcaggcagttttcgggcaaaaaaatggggatgtgccacaaattccattttcactttcggataataaactttcagaaagcgatgtgttggtatcaagttacttaactttattacgcttaaaagaaagcaattttagtgcagaagatgtcttggtattgttggatattcctgcgatgcgagaacgatttaatatttcccttgctgatttaccattagtgcgagaatgggtaacggattcagggattcgtttcggtttgcaaaaaaatcaagatggcatcaatttcaattcttggcaggctggattagaacgaatgattttaggctatgcgatgcgtgaagaacagggcatttggcaagatagtctgggcttaaacagcagttatggcttaaagggcgagcttgctggaaatttatctcactttttcaccgcactttccgcgctgcatgaaacgctgcaacaagcacattccatcgaaaaatggcaagaaattttaaccgcacttttatcggatttcttcgtgcgaaatgaagacacaagcgacatgattttctatattcaagagaaaattaatgaattagctgagcatctaaaaacgctccattttaatgaagaattacaagcagaagtgatcgccgatgtcatcacaatgcaattggaagatgcgccaaatagcctcaaattccttgcaggaaaagtaaatttctgcaccttattaccaatgcgttcagtgccattcaaagtggtttgtttacttggaatgaatgatgcggattacccaagaacacaaacaccaaacagttttgatttaatgcaatatcattatcaaaaaggcgatcgtgttcgccgtgatgatgatcgctatttgttcttagaagccttattggccgcacgtgattattgctatatcagctatgttgggcgttccattacagataatcaaccgaaagaaccatccgtattggtaagtcaactgttggattatattaatcaagggcaaaaggaaaatgtccttactgtcattgaacatccaatgaccgcatttagcccagataatttcaaaaacaacgaaaaatttacccgctcttttgcgacaaaatggttgccaatagcacaatttgacgcgagttccaacaattcagaatttgccgtcactatgacagaaaacctagaaaaaatcgaagaagttgaactggatgctttagtcagctttgtggaaaatccagtgaaatttttctttgaaaaacaactcggtgtttatttccgcgataaagatgaacgcattgctgacagtgaaaacttcactttaagtgggttagataattattctctcaataatgacttaatttaccttgatgaacaaaattttgctgattattttagacaagcagaagtaaaaggcgtgttaccgcgcgcagagtttggaaaggtttatgctgaaaatattcgcgacaatgttttagaatttaaaaagaaaatagcagatcttggcgaagccaaacatgcttctgtcgattttaatctctccgtagattggcaaaacgaaaatcaaaaaatacgtttatttggttatatggacgctttatttggcgatgattcacaagtcattcactggcattttgctaaatataaagatcgttattgtattcgtccttggatttattatttaattcaatgtgttacacaagaaaatgcggtaccagcaaaattaattacgcaagataaggttctcgaattaccgcctattgagcgtgaagttgcacttgctcaattacaaatttacgtaaaagattatttacaaagtcaaattgaaatccaattggtgccaacagtaagaaatataagtgattttattgtaagtgatgaaaattccgtttctgaaaaacttcaggaattaactgaaagtaatggtttcgggccaaaagccgatccatattggtcacgagtattagcgcagacctcaagatttaaacaacctgaaaatattgcaaaattattaaaacaaacaaaagcttggtttggcttattattcgcacaaaagaagacaagaaagacacaaagctaa

SEQ ID NO: 157313 - protein, 1121 aa, Haemophilus influenzae
MFIVYYSNQLEKQKEILSSLFKSLPPEDPFQQDIILVQSPNMAQWLQIELAKETGISANLKFPMPASFIWQLYAQNLPATALENPFDKDSMMWRLMRLIPIFLEKENFSPLRNYLSSSPHSEQYKLYQLSSKIADLFDQYLVYRPEWIFAWEKGEDEQITDQIQKQQPNLNATLFAQIQGNTKWQGELWRALVVDVKSDVNEATHRAALHNQFLALLADKKAPKKLPSRIFIFGIPALPTAYLNILQAISSEVDIHLFFNNPCQEYWGDISDLRLDYLRSRQRYQFNKQDENQPLFSEDQLSQLENAQFDVTYQKENLQLGNPLLAAWGKMGRDFLYILVRDEEHIPTYPVNAYQEIESNSLLGQLQSQILHLENKPLNIAKNDRTLTLHSCHSAMREVEVLHDYLLDLFNQDPSLTPKDVVVMVADINQYTPYIQAVFGQKNGDVPQIPFSLSDNKLSESDVLVSSYLTLLRLKESNFSAEDVLVLLDIPAMRERFNISLADLPLVREWVTDSGIRFGLQKNQDGINFNSWQAGLERMILGYAMREEQGIWQDSLGLNSSYGLKGELAGNLSHFFTALSALHETLQQAHSIEKWQEILTALLSDFFVRNEDTSDMIFYIQEKINELAEHLKTLHFNEELQAEVIADVITMQLEDAPNSLKFLAGKVNFCTLLPMRSVPFKVVCLLGMNDADYPRTQTPNSFDLMQYHYQKGDRVRRDDDRYLFLEALLAARDYCYISYVGRSITDNQPKEPSVLVSQLLDYINQGQKENVLTVIEHPMTAFSPDNFKNNEKFTRSFATKWLPIAQFDASSNNSEFAVTMTENLEKIEEVELDALVSFVENPVKFFFEKQLGVYFRDKDERIADSENFTLSGLDNYSLNNDLIYLDEQNFADYFRQAEVKGVLPRAEFGKVYAENIRDNVLEFKKKIADLGEAKHASVDFNLSVDWQNENQKIRLFGYMDALFGDDSQVIHWHFAKYKDRYCIRPWIYYLIQCVTQENAVPAKLITQDKVLELPPIEREVALAQLQIYVKDYLQSQIEIQLVPTVRNISDFIVSDENSVSEKLQELTESNGFGPKADPYWSRVLAQTSRFKQPENIAKLLKQTKAWFGLLFAQKKTRKTQS

SEQ ID NO: 157314 - DNA, 3294 bp, Mycobacterium tuberculosis
  CDS (1)..(3294): transl_table=11
atggcgcttcacctgcaccgtgccgagcgcaccgatctgcttgccgacgggctcggcgcgctgctggccgatccccagcccgaccctttcgcgcaggaactggtgctggtcgctgcccgcggcgtggaacgctggctgagccaacggctttcgctcgtgttgggctgcgggccgggccgcgccgacggggtgtgcgccggcatcgcgttccgcaatccgcagtccctgatcgccgagatcaccggcaccctcgacgacgacccgtggtcgccggaagccctggcgtggccgctgctggcggtgatcgacgccagcctcgacgaaccgtggtgccgcacgctggcatcccacttggggcacttcgcgacgaccgatgccgaggcggagctgcgccgcggccggcgctattcggtggcgcgccggctagccgggctgttcgcgtcctatgcacgccagcgtcccgggttgctggccgcttggctggacggcgacctcggcgagctgcccggcgacttggcctggcaaccgccactgtggcgcgccctggtgaccacggtcggggccgatcccccgcatgtccgccacgacaagaccatcgcccggctgcgcgacggccccgccgacctgccggctcggctttcgctgttcggccacacccgcctggcctgcaccgacgtgcagctgctggatgcgctggccgtccaccacgacctgcacctgtggctgccgcaccccagcgacgagttgtggcgggcgctggccggcttccagggcgctgatggcctgctgccgcggcggcaggacaccagccggcgggccgcccagcacccgctgctggaaacgctgggccgcgacgtgcgcgaactgcagcgcgcgctgcccgccgcccgggccaccgacgaattccttggtgccacaaccaaacccgacacgttgctgggatggctgcaagccgacatcgccggcaacgcgccgcgacccgccgggcgtagcttgtcggatgccgaccgatcggtgcaggtccatgcctgtcacggcccggcgcggcaaatcgatgtgctgcgcgaggtgctgctcggcctcctcgaggacgacccgacgctgcaaccgcgcgacatcgtggtgatgtgccccgacatcgacacctacgcaccgttgatcgtcgccggcttcggcctcggtgaggtggccggcgactgccaccccgcacaccggctgcgggtgcgtctggccgaccgcgccctgacccagaccaatccgctgctctcggtggccgccgaactgctcaccatcgccgaaacccgggccaccgccagccaactgctcaacctcgcgcaggccgctccggtgcgcgccaaattcgggttcgccgacgacgacctggacaccatcaccacgtgggtgcgcgaatcgaacatccgctggggcttcgacccgacgcaccggcgacgctatggcctcgacaccgtcgtgcacaacacgtggcggttcggactcgaccgcatcctcaccggggtggccatgtccgaggattcccaagcgtggctggataccgcgctgccccttgatgacgtcggcagcaatcgggtcgagctggccgggaggctggccgagttcgtcgaacggttgcatcatgtcgtcggcggactcagcggtgcacggccgttggtcgcatggctggatgcgctggccacggggatcgatctgctgaccgcctgtaacgacggctggcaacgcgcgcaggtgcagcgggagttcgccgacgtgctggcgcgcgccggttcgcgcgcggcgccgctgttgcggctgcccgacgtgcgagcgcttttggacgcgcagctggccgggcgcccgacccgggccaactttcgcaccggcacgctgaccgtctgcacgatggtcccgatgcgctcggtgccgcaccgggtggtgtgcctggtgggtctggacgacggcgtgtttccgcggctgagccatcccgacggggacgacgtgctggcccgagaaccgatgacgggtgaacgtgacatccgttcggaggaccggcaattgctgctggacgcgataggtgcggccacccagaccctggtgatcacttacaccggcgccgacgagcgcaccgggcaaccgcgcccacccgcggtgccgctggccgagttgctcgacgcgctcgaccagacgacgtcagcgccggtgcgtgagcggatcctggtcacacacccactgcagccgttcgaccggaagaacgtcacccccggcgcactgctgggcgccaagccgttcacgttcgaccccgccgcgctcgccgccgcccaggccgccgccgggaagcgctgtccaccaacggctttcatctccggtcggctgcccgcaccacccgcggccgacgtgacgctggcggacctgctcgacttcttcaaggatccggtcaaggggttcttccgggcgctggactacacgctgccctgggacgtcgacaccgtcgaggactcgataccggtccaggtcgacgccttggccgagtggacggtgggcgagcggatgttgcgcgacatgctccgcggcctgcaccccgacgacgccgctcactccgaatggcgtcgcggcacgttgccgcccgggcgcctcggcgtgcgacgggcgaaggaaatccggaaccgcgcgcgcgatctggcggccgccgcgctggcgcaccgcgacggccacggccaggcgcacgacgtcgacgtcgacctcggcgacgggcggcgactgagcggcacggtgacacccgtgttcggcgggcgcacggtgtcggtgacctactcaaagctggcgcccaagcatgtgttgccggcgtggatcggcctggttacgctggccgcccaagagcctggccgcgagtggtcggcgctgtgcatcggccgcagcaagaccaggaaccacatcgccagaaggcttttcgtgccgccgccggacccggtggcggtattgcgggagctggtgttgctgtacgacgccggccggcgcgaaccactgccgctgccgctgaagacgtcctgcgcgtgggcccaggcacgccgagacggccaagacccctacccgcccgcccgcgaatgctggcagaccaacaggttccggccgggcgacgacgacgcgcccgcccacgtgcgagcctggggcccgcgcgcacccttcgaggtgttgctcggcaagccccgcgcgggcgaagaggtcgccggggaagagacccggctaggggcgctggccgcccggctatggctgccgctgttggccgccgaagggtcggtctga

SEQ ID NO: 157315 - protein, 1097 aa, Mycobacterium tuberculosis
MALHLHRAERTDLLADGLGALLADPQPDPFAQELVLVAARGVERWLSQRLSLVLGCGPGRADGVCAGIAFRNPQSLIAEITGTLDDDPWSPEALAWPLLAVIDASLDEPWCRTLASHLGHFATTDAEAELRRGRRYSVARRLAGLFASYARQRPGLLAAWLDGDLGELPGDLAWQPPLWRALVTTVGADPPHVRHDKTIARLRDGPADLPARLSLFGHTRLACTDVQLLDALAVHHDLHLWLPHPSDELWRALAGFQGADGLLPRRQDTSRRAAQHPLLETLGRDVRELQRALPAARATDEFLGATTKPDTLLGWLQADIAGNAPRPAGRSLSDADRSVQVHACHGPARQIDVLREVLLGLLEDDPTLQPRDIVVMCPDIDTYAPLIVAGFGLGEVAGDCHPAHRLRVRLADRALTQTNPLLSVAAELLTIAETRATASQLLNLAQAAPVRAKFGFADDDLDTITTWVRESNIRWGFDPTHRRRYGLDTVVHNTWRFGLDRILTGVAMSEDSQAWLDTALPLDDVGSNRVELAGRLAEFVERLHHVVGGLSGARPLVAWLDALATGIDLLTACNDGWQRAQVQREFADVLARAGSRAAPLLRLPDVRALLDAQLAGRPTRANFRTGTLTVCTMVPMRSVPHRVVCLVGLDDGVFPRLSHPDGDDVLAREPMTGERDIRSEDRQLLLDAIGAATQTLVITYTGADERTGQPRPPAVPLAELLDALDQTTSAPVRERILVTHPLQPFDRKNVTPGALLGAKPFTFDPAALAAAQAAAGKRCPPTAFISGRLPAPPAADVTLADLLDFFKDPVKGFFRALDYTLPWDVDTVEDSIPVQVDALAEWTVGERMLRDMLRGLHPDDAAHSEWRRGTLPPGRLGVRRAKEIRNRARDLAAAALAHRDGHGQAHDVDVDLGDGRRLSGTVTPVFGGRTVSVTYSKLAPKHVLPAWIGLVTLAAQEPGREWSALCIGRSKTRNHIARRLFVPPPDPVAVLRELVLLYDAGRREPLPLPLKTSCAWAQARRDGQDPYPPARECWQTNRFRPGDDDAPAHVRAWGPRAPFEVLLGKPRAGEEVAGEETRLGALAARLWLPLLAAEGSV

SEQ ID NO: 157316 - DNA, 25 bp, Artificial sequence
  primer
atgttaagggtctaccattccaatc

SEQ ID NO: 157317 - DNA, 26 bp, Artificial sequence
  primer
ttatgactgattaaagcgaaacagcg

SEQ ID NO: 157318 - protein, 1389 aa, Artificial sequence
  consensus sequence
  Variant (2)..(5): Xaa in position 2 to 5 is any amino acid
  Variant (7)..(18): Xaa in position 7 to 18 is any amino acid
  Variant (19)..(32): Xaa in position 19 to 32 is any or no amino acid
  Variant (34)..(40): Xaa in position 34 to 40 is any amino acid
  Variant (42)..(48): Xaa in position 42 to 48 is any amino acid
  Variant (51)..(58): Xaa in position 51 to 58 is any amino acid
  Variant (60)..(61): Xaa in position 60 to 61 is any amino acid
  Variant (62)..(73): Xaa in position 62 to 73 is any or no amino acid
  Variant (75)..(80): Xaa in position 75 to 80 is any amino acid
  Variant (82)..(103): Xaa in position 82 to 103 is any amino acid
  Variant (104)..(113): Xaa in position 104 to 113 is any or no amino acid
  Variant (115)..(127): Xaa in position 115 to 127 is any amino acid
  Variant (128)..(144): Xaa in position 128 to 144 is any or no amino acid
  Variant (146)..(155): Xaa in position 146 to 155 is any amino acid
  Variant (156)..(181): Xaa in position 156 to 181 is any or no amino acid
  Variant (183)..(186): Xaa in position 183 to 186 is any amino acid
  Variant (188)..(192): Xaa in position 188 to 192 is any amino acid
  Variant (194)..(196): Xaa in position 194 to 196 is any amino acid
  Variant (198)..(203): Xaa in position 198 to 203 is any amino acid
  Variant (205)..(211): Xaa in position 205 to 211 is any amino acid
  Variant (212)..(238): Xaa in position 212 to 238 is any or no amino acid
  Variant (241)..(242): Xaa in position 241 to 242 is any amino acid
  Variant (245)..(246): Xaa in position 245 to 246 is any amino acid
  Variant (248)..(269): Xaa in position 248 to 269 is any amino acid
  Variant (270)..(288): Xaa in position 270 to 288 is any or no amino acid
  Variant (291)..(291): Xaa in position 291 is any amino acid
  Variant (293)..(295): Xaa in position 293 to 295 is any amino acid
  Variant (298)..(308): Xaa in position 298 to 308 is any amino acid
  Variant (310)..(311): Xaa in position 310 to 311 is any amino acid
  Variant (313)..(324): Xaa in position 313 to 324 is any amino acid
  Variant (326)..(329): Xaa in position 326 to 329 is any amino acid
  Variant (331)..(352): Xaa in position 331 to 352 is any amino acid
  Variant (353)..(389): Xaa in position 353 to 389 is any or no amino acid
  Variant (393)..(394): Xaa in position 393 to 394 is any amino acid
  Variant (396)..(404): Xaa in position 396 to 404 is any amino acid
  Variant (406)..(422): Xaa in position 406 to 422 is any amino acid
  Variant (423)..(445): Xaa in position 423 to 445 is any or no amino acid
  Variant (448)..(450): Xaa in position 448 to 450 is any amino acid
  Variant (452)..(466): Xaa in position 452 to 466 is any amino acid
  Variant (467)..(510): Xaa in position 467 to 510 is any or no amino acid
  Variant (512)..(512): Xaa in position 512 is any amino acid
  Variant (514)..(519): Xaa in position 514 to 519 is any amino acid
  Variant (521)..(523): Xaa in position 521 to 523 is any amino acid
  Variant (525)..(528): Xaa in position 525 to 528 is any amino acid
  Variant (530)..(530): Xaa in position 530 is any amino acid
  Variant (532)..(532): Xaa in position 532 is any amino acid
  Variant (535)..(541): Xaa in position 535 to 541 is any amino acid
  Variant (542)..(550): Xaa in position 542 to 550 is any or no amino acid
  Variant (552)..(552): Xaa in position 552 is any amino acid
  Variant (553)..(556): Xaa in position 553 to 556 is any or no amino acid
  Variant (558)..(558): Xaa in position 558 is any amino acid
  Variant (560)..(561): Xaa in position 560 to 561 is any amino acid
  Variant (564)..(569): Xaa in position 564 to 569 is any amino acid
  Variant (571)..(571): Xaa in position 571 is any amino acid
  Variant (573)..(575): Xaa in position 573 to 575 is any amino acid
  Variant (579)..(586): Xaa in position 579 to 586 is any amino acid
  Variant (587)..(607): Xaa in position 587 to 607 is any or no amino acid
  Variant (609)..(624): Xaa in position 609 to 624 is any amino acid
  Variant (626)..(626): Xaa in position 626 is any amino acid
  Variant (628)..(630): Xaa in position 628 to 630 is any amino acid
  Variant (632)..(639): Xaa in position 632 to 639 is any amino acid
  Variant (642)..(662): Xaa in position 642 to 662 is any amino acid
  Variant (664)..(669): Xaa in position 664 to 669 is any amino acid
  Variant (673)..(690): Xaa in position 673 to 690 is any amino acid
  Variant (691)..(705): Xaa in position 691 to 705 is any or no amino acid
  Variant (707)..(708): Xaa in position 707 to 708 is any amino acid
  Variant (711)..(744): Xaa in position 711 to 744 is any amino acid
  Variant (745)..(758): Xaa in position 745 to 758 is any or no amino acid
  Variant (760)..(774): Xaa in position 760 to 774 is any amino acid
  Variant (775)..(776): Xaa in position 775 to 776 is any or no amino acid
  Variant (778)..(830): Xaa in position 778 to 830 is any amino acid
  Variant (831)..(857): Xaa in position 831 to 857 is any or no amino acid
  Variant (859)..(868): Xaa in position 859 to 868 is any amino acid
  Variant (869)..(869): Xaa in position 869 is any or no amino acid
  Variant (871)..(878): Xaa in position 871 to 878 is any amino acid
  Variant (879)..(879): Xaa in position 879 is any or no amino acid
  Variant (883)..(884): Xaa in position 883 to 884 is any amino acid
  Variant (886)..(890): Xaa in position 886 to 890 is any amino acid
  Variant (892)..(892): Xaa in position 892 is any amino acid
  Variant (894)..(899): Xaa in position 894 to 899 is any amino acid
  Variant (902)..(907): Xaa in position 902 to 907 is any amino acid
  Variant (911)..(917): Xaa in position 911 to 917 is any amino acid
  Variant (918)..(922): Xaa in position 918 to 922 is any or no amino acid
  Variant (926)..(927): Xaa in position 926 to 927 is any amino acid
  Variant (929)..(930): Xaa in position 929 to 930 is any amino acid
  Variant (933)..(933): Xaa in position 933 is any amino acid
  Variant (935)..(935): Xaa in position 935 is any amino acid
  Variant (937)..(937): Xaa in position 937 is any amino acid
  Variant (939)..(941): Xaa in position 939 to 941 is any amino acid
  Variant (943)..(945): Xaa in position 943 to 945 is any amino acid
  Variant (947)..(951): Xaa in position 947 to 951 is any amino acid
  Variant (953)..(962): Xaa in position 953 to 962 is any amino acid
  Variant (963)..(963): Xaa in position 963 is any or no amino acid
  Variant (965)..(987): Xaa in position 965 to 987 is any amino acid
  Variant (988)..(1013): Xaa in position 988 to 1013 is any or no amino acid
  Variant (1015)..(1051): Xaa in position 1015 to 1051 is any amino acid
  Variant (1052)..(1121): Xaa in position 1052 to 1121 is any or no amino acid
  Variant (1123)..(1125): Xaa in position 1123 to 1125 is any amino acid
  Variant (1127)..(1133): Xaa in position 1127 to 1133 is any amino acid
  Variant (1134)..(1135): Xaa in position 1134 to 1135 is any or no amino acid
  Variant (1137)..(1156): Xaa in position 1137 to 1156 is any amino acid
  Variant (1157)..(1159): Xaa in position 1157 to 1159 is any or no amino acid
  Variant (1161)..(1179): Xaa in position 1161 to 1179 is any amino acid
  Variant (1180)..(1202): Xaa in position 1180 to 1202 is any or no amino acid
  Variant (1204)..(1204): Xaa in position 1204 is any amino acid
  Variant (1207)..(1244): Xaa in position 1207 to 1244 is any amino acid
  Variant (1245)..(1279): Xaa in position 1245 to 1279 is any or no amino acid
  Variant (1281)..(1299): Xaa in position 1281 to 1299 is any amino acid
  Variant (1300)..(1318): Xaa in position 1300 to 1318 is any or no amino acid
  Variant (1320)..(1322): Xaa in position 1320 to 1322 is any amino acid
  Variant (1324)..(1353): Xaa in position 1324 to 1353 is any amino acid
  Variant (1354)..(1378): Xaa in position 1354 to 1378 is any or no amino acid
  Variant (1380)..(1388): Xaa in position 1380 to 1388 is any amino acid
NXXXXLXXXXXXXXXXXXXXXXXXXXXXXXXXPXXXXXXXVXXXXXXXWLXXXXXXXXGXXXXXXXXXXXXXXAXXXXXXPXXXXXXXXXXXXXXXXXXXXXXXXXXXXXXXXWXXXXXXXXXXXXXXXXXXXXXXXXXXXXXXLXXXXXXXXXXXXXXXXXXXXXXXXXXXXXXXXXXXXLXXXXAXXXXXYXXXRXXXXXXWXXXXXXXXXXXXXXXXXXXXXXXXXXXXXXXXXXWQXXLWXXLXXXXXXXXXXXXXXXXXXXXXXXXXXXXXXXXXXXXXXXXXLPXRXXXFGXXXXXXXXXXXLXXLXXXXXXXXXXXXPXXXXWXXXXXXXXXXXXXXXXXXXXXXXXXXXXXXXXXXXXXXXXXXXXXXXXXXXXXXXXXXXLLAXXGXXXXXXXXXLXXXXXXXXXXXXXXXXXXXXXXXXXXXXXXXXXXXXXXXXLLXXXQXXXXXXXXXXXXXXXXXXXXXXXXXXXXXXXXXXXXXXXXXXXXXXXXXXXXXXXXXXXDXSXXXXXXHXXXRXXXXLXDXLLXXXXXXXXXXXXXXXXLXXXXXPXDXXVMXXXXXXYXPXXXAVFXXXXXXXXXXXXXXXXXXXXXXXXXXXXXDXXXXXXXXXXXXXXXXLXLXXXRXXXXXXXXLLXXXXXXXXXXXXXXXXXXXXXWXXXXXXRWGXXXXXXXXXXXXXXXXXXXXXXXXXXXXXXXXXRXXLGXXXXXXXXXXXXXXXXXXXXXXXXXXXXXXXXXXXXXXXXXXXXXXXXLXXXXXXXXXXXXXXXXXWXXXXXXXXXXXXXXXXXXXXXXXXXXXXXXXXXXXXXXXXXXXXXXXXXXXXXXXXXXXXXXXXXXXXXXXXXXXXXXXXLXXXXXXXXXXXGXXXXXXXXXPMRXXPXXXXXLXGXXXXXXPRXXXXXXFDLXXXXXXXXXXXXGDRXXRXXDRXLXLXAXXXAXXXLXXXXXGXXXXXXXXXXXPXXXXXXXXXXXXXXXXXXXXXXXXXXXXXXXXXXXXXXXXXXXXXXXXXFXXXXXXXXXXXXXXXXXXXXXXXXXXXXXXXXXXXXXXXXXXXXXXXXXXXXXXXXXXXXXXXXXXXXXXXXXXXXXXXXXXXXXXXXXXXXXXXXXXXXXXXXXXXFXXXPXXXXXXXXXLXXXXXXXXXXXXXXXXXXXXXXXLXXXXXXXXXXXXXXXXXXXXXXXXXXXXXXXXXXXXXXXXXXGXLPXXXXXXXXXXXXXXXXXXXXXXXXXXXXXXXXXXXXXXXXXXXXXXXXXXXXXXXXXXXXXXXXXXXXXXXXXGXXXXXXXXXXXXXXXXXXXXXXXXXXXXXXXXXXXXXXWXXXLXXXXXXXXXXXXXXXXXXXXXXXXXXXXXXXXXXXXXXXXXXXXXXXXXXXXXXXLXXXXXXXXXG

SEQ ID NO: 157319 - protein, 39 aa, Artificial sequence
  protein pattern
  Variant (2)..(2): Xaa in position 2 is any amino acid
  Variant (3)..(3): Xaa in position 3 is Ile, Leu, Met or Val
  Variant (4)..(4): Xaa in position 4 is Asn, Ser or Thr
  Variant (5)..(5): Xaa in position 5 is Phe, Ile or Val
  Variant (6)..(6): Xaa in position 6 is Ala, Cys, Gly or Ser
  Variant (7)..(7): Xaa in position 7 is any amino acid
  Variant (8)..(8): Xaa in position 8 is Leu or Met
  Variant (9)..(9): Xaa in position 9 is any amino acid
  Variant (13)..(13): Xaa in position 13 is any amino acid
  Variant (14)..(14): Xaa in position 14 is Ile, Leu or Val
  Variant (16)..(17): Xaa in position 16 to 17 is any amino acid
  Variant (18)..(19): Xaa in position 18 to 19 is any or no amino acid
  Variant (21)..(22): Xaa in position 21 to 22 is any amino acid
  Variant (23)..(24): Xaa in position 23 to 24 is any or no amino acid
  Variant (26)..(26): Xaa in position 26 is Leu, Met or Val
  Variant (27)..(27): Xaa in position 27 is Asp, Asn or Ser
  Variant (28)..(30): Xaa in position 28 to 30 is any amino acid
  Variant (31)..(31): Xaa in position 31 is Phe or Tyr
  Variant (33)..(38): Xaa in position 33 to 38 is any amino acid
  Variant (39)..(39): Xaa in position 39 is Asp, Gly, Ser, Thr or Val
GXXXXXXXXPMRXXPXXXXVXXXXGXXXXXXPXXXXXXX

SEQ ID NO: 157320 - protein, 41 aa, Artificial sequence
  protein pattern
  Variant (2)..(5): Xaa in position 2 to 5 is any amino acid
  Variant (6)..(7): Xaa in position 6 to 7 is any or no amino acid
  Variant (9)..(9): Xaa in position 9 is any or no amino acid
  Variant (11)..(11): Xaa in position 11 is any amino acid
  Variant (12)..(12): Xaa in position 12 is Leu or Val
  Variant (13)..(13): Xaa in position 13 is Phe or Leu
  Variant (15)..(15): Xaa in position 15 is Asp or Glu
  Variant (16)..(16): Xaa in position 16 is Ala or Leu
  Variant (17)..(17): Xaa in position 17 is Ile, Leu, Met or Val
  Variant (18)..(18): Xaa in position 18 is any amino acid
  Variant (19)..(19): Xaa in position 19 is Ala or Ser
  Variant (20)..(20): Xaa in position 20 is Ala, Cys, Ser, Thr or Val
  Variant (21)..(25): Xaa in position 21 to 25 is any amino acid
  Variant (26)..(26): Xaa in position 26 is Ile, Leu, Met or Val
  Variant (27)..(27): Xaa in position 27 is any amino acid
  Variant (28)..(28): Xaa in position 28 is Trp or Tyr
  Variant (29)..(29): Xaa in position 29 is any amino acid
  Variant (30)..(30): Xaa in position 30 is Cys, Gly or Ser
  Variant (31)..(40): Xaa in position 31 to 40 is any amino acid
  Variant (41)..(41): Xaa in position 41 is Ala or Pro
DXXXXXXDXRXXXLXXXXXXXXXXXXXXXXXXXXXXXXXXX

SEQ ID NO: 157321 - DNA, 2196 bp, Escherichia coli
  CDS (1)..(2196): transl_table=11
atggggcagggttttccaccttgtccggtattcttacttccccgaaacgggtttgcgcttatgaaatcaatgaatattgccgccagtagtgaactggtatcccgactttcttctcatcgtcgcgtggtggcgttgggagatactgattttacggacgtcgcggcagtcgtcattaccgctgcggatagtcgcagtggcattcttgcgttgcttaagcgcaccggttttcatctaccggtgtttttgtattccgaacatgctgttgaattacctgcgggcgttacggcggtaatcaacggcaacgagcagcagtggctggagctggaatccgcagcctgtcagtatgaagagaatttgctgccaccgttttatgacacgctgacgcagtacgttgagatgggcaacagcacctttgcttgccctggacatcaacatggtgcgttttttaaaaagcatcctgccggacgccatttttacgatttctttggtgagaacgtctttcgcgccgatatgtgtaacgctgacgtaaaattgggcgatctgcttattcatgaaggatcggcgaaagatgcgcagaaattcgcagccaaagtctttcatgccgataaaacctattttgtgctgaacggcacatcggcagcgaataaagtggtgacgaatgcgctgttaacgcgtggcgatctggtgctcttcgaccgtaacaaccataagtcgaatcatcacggcgcgctgattcaggcgggggcgacgccggtctatctggaagcttcacgcaacccgtttggtttcattggcggtattgatgcgcactgttttaatgaagagtatctgcgccagcaaattcgcgacgttgcgccagaaaaagccgacctgccgcgcccgtatcgcctggcgattattcagctgggaacctatgacggcactgtctataacgcccgtcaggtgatcgataccgttgggcatctgtgtgattacattctgtttgattccgcgtgggtcggttatgaacaatttatcccgatgatggcggatagctcgccgctgctgttagaacttaacgaaaacgatccggggatctttgtgactcagtcggtgcacaaacagcaggcgggattctcacagacgtcgcagatccataaaaaagataaccatatccgcggacaggcgcgtttttgcccgcataagcggttgaataacgcctttatgctccatgcttctaccagccctttctatccgctgtttgctgcactggatgttaacgccaaaattcatgaaggggagagtgggcgtcggctgtgggctgagtgtgttgagatagggattgaagcgcgcaaggctattcttgcgcgctgtaagctgttccgcccgtttatcccgcccgttgttgatggcaaattgtggcaggattatccgacatcagtgttagccagcgaccgccgttttttcagttttgagccgggggcgaagtggcacggctttgaaggatatgccgcggatcagtattttgttgatccgtgcaagctgttactcactacaccaggtatcgatgccgaaaccggcgaatatagcgactttggcgttccggcgacgattctggcgcactatctgcgtgagaacggcattgtgccggagaagtgcgatctcaactccattctgtttttattaactccggcggaaagccacgagaagctggcacaactggtggcgatgctggcgcaatttgaacagcatattgaggatgactcgccgctggttgaggtgttgccgagcgtttataacaagtatccggtgcgctatcgcgactacaccctgcgccagttgtgtcaggagatgcacgatctgtatgtcagtttcgacgtcaaagacctacaaaaagcgatgttccgccagcagagtttcccgtcagtggtgatgaacccccaggatgcgcatagcgcttatattcgcggtgacgtggagttggtgcggattcgtgatgccgaagggcgaattgcggcagaaggggcgttgccttatccacctggcgtgctttgcgtggtacccggggaagtctggggtggggcggttcaacgttatttccttgcactggaagaaggggtgaatttgttgccgggattttcgccggagctgcaaggtgtttatagcgaaaccgatgcggatggcgtgaaacggttgtacggttatgtgttgaagtaa

SEQ ID NO: 157322 - protein, 731 aa, Escherichia coli
MGQGFPPCPVFLLPRNGFALMKSMNIAASSELVSRLSSHRRVVALGDTDFTDVAAVVITAADSRSGILALLKRTGFHLPVFLYSEHAVELPAGVTAVINGNEQQWLELESAACQYEENLLPPFYDTLTQYVEMGNSTFACPGHQHGAFFKKHPAGRHFYDFFGENVFRADMCNADVKLGDLLIHEGSAKDAQKFAAKVFHADKTYFVLNGTSAANKVVTNALLTRGDLVLFDRNNHKSNHHGALIQAGATPVYLEASRNPFGFIGGIDAHCFNEEYLRQQIRDVAPEKADLPRPYRLAIIQLGTYDGTVYNARQVIDTVGHLCDYILFDSAWVGYEQFIPMMADSSPLLLELNENDPGIFVTQSVHKQQAGFSQTSQIHKKDNHIRGQARFCPHKRLNNAFMLHASTSPFYPLFAALDVNAKIHEGESGRRLWAECVEIGIEARKAILARCKLFRPFIPPVVDGKLWQDYPTSVLASDRRFFSFEPGAKWHGFEGYAADQYFVDPCKLLLTTPGIDAETGEYSDFGVPATILAHYLRENGIVPEKCDLNSILFLLTPAESHEKLAQLVAMLAQFEQHIEDDSPLVEVLPSVYNKYPVRYRDYTLRQLCQEMHDLYVSFDVKDLQKAMFRQQSFPSVVMNPQDAHSAYIRGDVELVRIRDAEGRIAAEGALPYPPGVLCVVPGEVWGGAVQRYFLALEEGVNLLPGFSPELQGVYSETDADGVKRLYGYVLK

SEQ ID NO: 157323 - DNA, 2199 bp, Escherichia coli
  CDS (1)..(2199): transl_table=11
atgtcagaattaaaaattgccgttagtcgttcttgcccggattgtttttccactcatcgtgcatgcgtgaatatagacgaaagtaattatattgacgttgccgccattattttatcagtcagtgatgttgaacgtggaaaactcgatgaaatagacgctactggctatgacattcctgtttttattgcaacggaaaatgaagaacgtataccagcagaatatctttcacgtatttctggtgtcttcgaacatggagaagcacgcaaagaattttatggtcgtcagttagaaaccgctgccagccattatgaaactcaactgcgcccacctttctttcgcgcactggtcgattatgtcaatcagggcaacagcgcatttgactgccccggtcatcagggcggcgaatttttccgtcgccatccggcggggaatcagtttgtggaatactttggtgaggcgctgttccgtgccgacttgtgcaacgccgacgtagcgatgggcgatctgctgattcacgaaggcgcgccatgcattgcacagcaacatgcagcaaaagtgtttaatgccgataaaacctacttcgttttaaatggcacttcatcttctaacaaagtggttttaaacgccctgctgacaccgggtgatctggtgctatttgaccgcaataaccataagtctaaccaccacggggccttgctacaggctggtgcaacaccggtttatctggaaacagcacgtaacccgtatggttttatcggtggtattgatgcacactgcttcgaagaaagttatctgcgtgaactgattacagaagttgcaccgcaacgggcaaaagaggcgcgtccgttccgcctcgctgtgattcagctaggcacctacgacggtacgatttataacgcccgccaggtggtggataaaattggtcatctgtgtgactacatcctgtttgattccgcatgggtcggctatgaacagtttattccgatgatggctgactgttcgccgctgttgctggatcttaatgagaacgatccgggtattctggttacgcaatccgtacataaacagcaggctggtttttctcaaacttcacaaatccataaaaaagacagccacatcaaagggcaacagcgttatgtaccgcacaaacgcatgaacaacgcctttatgatgcatgcctccaccagcccgttctatccgctgtttgccgcactggatatcaacgccaaaatgcatgaaggtgtcagcggtcgtaatatgtggatggattgtgtggtaaatggcattaatgcccgcaaactgatcctcgataactgtcagcatattcgtccgttcatacctgaactggtggatggtaaaccctggcagtcgtatgaaacagcgcaaattgcggttgatctgcgcttcttccagtttgtaccaggtgagcactggcattcttttgaaggctatgcagagaatcaatactttgttgatccgtgcaaactgttgctgacaaccccaggtattgatgcacgtaacggcgaatatgaagcgttcggtgtacccgcgacgattcttgctaacttcctgcgcgaaaatggcgtagtgccggaaaaatgcgatcttaactccatcctcttcctgctgactccggcagaagatatggccaaacttcagcaacttgttgccctgctggtacgcttcgaaaaactgctggaatctgatgcgccgctggcggaagtgctaccttccatctacaaacagcatgaagagcgctacgccggttatacccttcgtcagttgtgccaggaaatgcatgatttgtatgcccgccacaacgtgaaacaactgcaaaaagagatgttccgtaaggaacacttcccacgcgtcagcatgaatccgcaagaagctaactacgcctatttacgcggtgaagtggagctggttcgtctgccggatgcagaaggccgtatcgctgccgaaggtgcgcttccttatcctccgggtgtgctgtgtgttgttccgggtgaaatctggggtggtgctgttttgcgttacttcagcgctctggaagaagggatcaacctgctgccaggttttgcaccggagctgcagggtgtctatatcgaagaacatgatggtcgtaagcaagtttggtgctatgtcatcaagcctcgtgatgcgcaaagcaccctgctgaaaggggaaaaattatga

SEQ ID NO: 157324 - protein, 732 aa, Escherichia coli
MSELKIAVSRSCPDCFSTHRACVNIDESNYIDVAAIILSVSDVERGKLDEIDATGYDIPVFIATENEERIPAEYLSRISGVFEHGEARKEFYGRQLETAASHYETQLRPPFFRALVDYVNQGNSAFDCPGHQGGEFFRRHPAGNQFVEYFGEALFRADLCNADVAMGDLLIHEGAPCIAQQHAAKVFNADKTYFVLNGTSSSNKVVLNALLTPGDLVLFDRNNHKSNHHGALLQAGATPVYLETARNPYGFIGGIDAHCFEESYLRELITEVAPQRAKEARPFRLAVIQLGTYDGTIYNARQVVDKIGHLCDYILFDSAWVGYEQFIPMMADCSPLLLDLNENDPGILVTQSVHKQQAGFSQTSQIHKKDSHIKGQQRYVPHKRMNNAFMMHASTSPFYPLFAALDINAKMHEGVSGRNMWMDCVVNGINARKLILDNCQHIRPFIPELVDGKPWQSYETAQIAVDLRFFQFVPGEHWHSFEGYAENQYFVDPCKLLLTTPGIDARNGEYEAFGVPATILANFLRENGVVPEKCDLNSILFLLTPAEDMAKLQQLVALLVRFEKLLESDAPLAEVLPSIYKQHEERYAGYTLRQLCQEMHDLYARHNVKQLQKEMFRKEHFPRVSMNPQEANYAYLRGEVELVRLPDAEGRIAAEGALPYPPGVLCVVPGEIWGGAVLRYFSALEEGINLLPGFAPELQGVYIEEHDGRKQVWCYVIKPRDAQSTLLKGEKL

SEQ ID NO: 157325 - DNA, 2163 bp, Vibrio cholerae
  CDS (1)..(2163): transl_table=11
atgaattcattaaaaattgctacgagtttatcggttcgctcttgcttcacaacccaacgtgaagtggtggatgtactgaaaaccgacttctgtgacattggtgcggcggtggtttccgtcgaagacgtacaaaacggcatcatagataaaatgaatgcgaccggtttgaaactgccgatctttgttgctgtgtgctgcgaagaccaattcccagatgatttttgcgccgatatcaccggggtatttgagctgtgtgatgccaaagtcgagttctacggtaagcaagtggaaactgccgtgcgtcgttatcaagaaagtttgttgccacctttctttggtacattgaaaaaatacgtggacatgggtaactccacttttgcttgcccaggccatcaaggtggtcagttcttccgtaagcacccggttggtcgccagttttttgatttctttggtgaaaccttgttccgctctgatatgtgtaacgcggacgtacgtttgggcgacttgctgatccatgaaggtgcaccgcatgatgcacaggcttacgccgcgaaagtgtacaacgcggataaaacctacttcgtacttaacgggacttcagcttccaacaaagtggtgtgtaacgccctgctgacaccgggagatctggtgctgtttgatcgcaacaaccataaatccaaccaccacggtgcgttaattcaagcgggtgcgacaccggtttacttagaaacggcgcgtaacccattcggttttatcggtgggattgatacgcactgctttaacgaatcttacctacgtgatgcggtacgtaatgtcgacccaagccgcgcggaagcgaaacgcccattccgtcttgccatcattcagcttggcacttacgacggtacgatttacaacgcgcgtcaggtggtggatcgcatcggtcatttgtgtgactacatcctgtttgactcagcatgggtgggctatgaacagttcattcccatgatgaaagactgctcgccacttcttctcgatctaaagcctgaagatccgggcatcatcgtcactcagtccgtgcataaacagcaggcaggtttctcgcaaacttcgcaaattcacaagaaagatcaccacatcaaaggccaagagcgttactgcaaccataaacgctttaacaatgcctttatgctgcacgcttcaaccagcccattctacccgctgtttgcggcgctcgatgtgaacgccaagatgcacgaaggggacagtggccgctacctatggcgtgaagcggtaaaaaccggtatcgaagcccgtaagcttctaatgaaaaaatgcaaatacatcaagccgttcattccaccaatgatcgaaggtaaaccttggcagtctcaccccaccgagcaaattgccgatgatttacgtttctttgaatttgagccgggccagaaatggcatgcgtttgaaggttacgagcatggtcagtatttcgttgacccttgtaagttcctgctgaccacaccggggattgacccagaaactggcgaatacgagcactttggtattccggccaccatactggccaacttcctgcgtgagaacaacatcatcccagagaagtgcgatttgaactctatcctcttcctgctcaccccagccgaagatatggcgaagatgcagcatttagtggcacaaattgctcgttttgaacgcttgattgaagaagatgcaccactgagcgaagtattgccgaacgtgtaccgcgcgaatcgcgaacgctacaaaggctacaccatccgtcagttgtgtcaggaaatgcacgatctgtatgtcagccatgatgtgaaacagctgcaaaaagagatgttccgcgcgcgttatttcccacgtgcggtaatgaacccacaagaagcgaacttggcctttgtacgtggtcaggttgagctagtcccactgcgtgaagtggaaggccgtatcgccgctgaaggcgcactgccttaccctccgggtgtgttgtgtgtggttccgggagaaatatggggcggttcagtacagcgttacttcctcgctctagaagaaggcattaacttgctgccgggttttgcgcctgaattgcaaggggtgtatttggagccgacaggcgagggacgagtgcaagccatgggctatgtactgaaacgttaa

SEQ ID NO: 157326 - protein, 720 aa, Vibrio cholerae
MNSLKIATSLSVRSCFTTQREVVDVLKTDFCDIGAAVVSVEDVQNGIIDKMNATGLKLPIFVAVCCEDQFPDDFCADITGVFELCDAKVEFYGKQVETAVRRYQESLLPPFFGTLKKYVDMGNSTFACPGHQGGQFFRKHPVGRQFFDFFGETLFRSDMCNADVRLGDLLIHEGAPHDAQAYAAKVYNADKTYFVLNGTSASNKVVCNALLTPGDLVLFDRNNHKSNHHGALIQAGATPVYLETARNPFGFIGGIDTHCFNESYLRDAVRNVDPSRAEAKRPFRLAIIQLGTYDGTIYNARQVVDRIGHLCDYILFDSAWVGYEQFIPMMKDCSPLLLDLKPEDPGIIVTQSVHKQQAGFSQTSQIHKKDHHIKGQERYCNHKRFNNAFMLHASTSPFYPLFAALDVNAKMHEGDSGRYLWREAVKTGIEARKLLMKKCKYIKPFIPPMIEGKPWQSHPTEQIADDLRFFEFEPGQKWHAFEGYEHGQYFVDPCKFLLTTPGIDPETGEYEHFGIPATILANFLRENNIIPEKCDLNSILFLLTPAEDMAKMQHLVAQIARFERLIEEDAPLSEVLPNVYRANRERYKGYTIRQLCQEMHDLYVSHDVKQLQKEMFRARYFPRAVMNPQEANLAFVRGQVELVPLREVEGRIAAEGALPYPPGVLCVVPGEIWGGSVQRYFLALEEGINLLPGFAPELQGVYLEPTGEGRVQAMGYVLKR

SEQ ID NO: 157327 - DNA, 2136 bp, Shigella flexneri
  CDS (1)..(2136): transl_table=11
atgaaatcaatgaatattgccgccagtagtgaactggtatcccgactttcttctcatcgccgcgtggtggcgttgggagatactgattttacggacgtcgcggcagtcgtcattaccgctgcggatagtcgcagtggcattcttgcgttgcttaagcgcaccggttttcatctaccggtgtttttgtattccgaacatgctgttgaattacctgcgggcgttacggcggtaatcaacggcaacgagcagcagtggctggagctggaatccgcagcctgtcagtatgaagagaatttgctgccaccgttttatgacacgctgacgcagtacgttgagatgggcaacagcacctttgcttgccctggacatcaacatggtgcgttctttaaaaagcatcctgccggacgccatttttacgatttctttggtgagaacgtctttcgcgccgatatgtgtaacgctgacgtaaaattgggcgatctgcttattcatgaaggatcggcgaaagatgcgcagaaattcgcagccaaagtctttcatgccgataaaacctattttgtgctgaacggcacatcggcagcgaataaagtggtgacgaatgcgctgttaacgcgtggcgatctggtgctcttcgaccgtaacaaccataagtcgaatcatcacggcgcgctgattcaggcggggacgacgccggtctatctggaagcttcacgtaacccgtttggtttcattggcggtattgatgcgcactgttttaatgaagagtatctgcgccagcaaattcgcgacgttgcgccagaaaaagccgacctgccgcgcccgtttcgcctgacgattattcagctgggaacctatgacggcactgtctataacgcccgtcaggtgatcgataccattgggcatctgtgtgattacattctgtttgattccgcgtgggtcggttacgaacagtttatctcgatgatggcggatagctcgccgctgctgttagaacttaacgaaaacgatccggggatttttgtgacccagttggtgcacaaacagcaggctggattctcacagacgtcgcagatccataaaaaagataaccatatccgcggacaggcgcgtttttgcccgcataagcggttgaataacgcctttatgctccatgcttctaccagccctttctatccgctgtttgctgcactggatgttaacgccaaaattcatgaaggggagagtgggcgtcggctgtgggctgagtgcgttgagttgggtattgagtcgcgcaaggctattcttgcgcgctgtaagctgttccgcccgtttatcccgcccgttgttgatggcaaattgtggcaggattatccgacatcagtgttagccagcgaccgccgttttttcagttttgagccgggggcgaagtggcacggctttgaaggatatgccgcggatcagtattttgttgatccgtgcaagctgttactcactacaccaggtatcaatgccgaaaccggcgaatatagcgactttggcgttccggcgacgattctggcgcactatctgcgtgagaacggcattgtgccggagaagtgcgatctcaactccattctgttcttattaactccggcggaaagccacgagaagctggcacaactggtggcgatgctggcgcaatttgaacagcatattgaggatgactcgtcgctggctgaggtgttgccgagcgtttataacaaatatccggtgcgctatcgcgactacaccctgcgccagttgtgtcaggagatgcacgatctgtatgtcagtttcgacgtcaaagacctacaaaaagcgatgttccgccagcagagtttcccgtcagtggtgatgaacccccaggatgcgcatagcgcttatattcgcggtgaagtggagttggtgcggattcgtgatgccgaagggcgaattgcggcagaaggggcgttgccttatccacctggcgtgctttgcgtggtacccggggaagtctggggtggggcggttcaacgttatttccttgcgctggaagaaggcgtgaatttgttgccgggattttcgccggagttgcaaggtgtctatagcgaaaccgatgcggatggcatgaaacgattgtacggttatgtgttgaagtaa

SEQ ID NO: 157328 - protein, 711 aa, Shigella flexneri
MKSMNIAASSELVSRLSSHRRVVALGDTDFTDVAAVVITAADSRSGILALLKRTGFHLPVFLYSEHAVELPAGVTAVINGNEQQWLELESAACQYEENLLPPFYDTLTQYVEMGNSTFACPGHQHGAFFKKHPAGRHFYDFFGENVFRADMCNADVKLGDLLIHEGSAKDAQKFAAKVFHADKTYFVLNGTSAANKVVTNALLTRGDLVLFDRNNHKSNHHGALIQAGTTPVYLEASRNPFGFIGGIDAHCFNEEYLRQQIRDVAPEKADLPRPFRLTIIQLGTYDGTVYNARQVIDTIGHLCDYILFDSAWVGYEQFISMMADSSPLLLELNENDPGIFVTQLVHKQQAGFSQTSQIHKKDNHIRGQARFCPHKRLNNAFMLHASTSPFYPLFAALDVNAKIHEGESGRRLWAECVELGIESRKAILARCKLFRPFIPPVVDGKLWQDYPTSVLASDRRFFSFEPGAKWHGFEGYAADQYFVDPCKLLLTTPGINAETGEYSDFGVPATILAHYLRENGIVPEKCDLNSILFLLTPAESHEKLAQLVAMLAQFEQHIEDDSSLAEVLPSVYNKYPVRYRDYTLRQLCQEMHDLYVSFDVKDLQKAMFRQQSFPSVVMNPQDAHSAYIRGEVELVRIRDAEGRIAAEGALPYPPGVLCVVPGEVWGGAVQRYFLALEEGVNLLPGFSPELQGVYSETDADGMKRLYGYVLK

SEQ ID NO: 157329 - DNA, 2358 bp, Bradyrhizobium sp. ORS278
  CDS (1)..(2358): transl_table=11
atggattacttccgccgcttcaccttcctgttcgccgcgcccgtcttcgaaaccgacgacctggccggcgtccgcttcaaccagatcatcgaggagatccagcgctcgggcttcgaggtcgtccgcgcccgcaagctggaggatgccgagatcgcggtgcagacggatgcggcgatcggctgcatggtggtggactggggcaagaaggggctggagggcaagacggcgtcgctgatcaacctgatgcgccgccgcggcctggacttcccgatcatcctcctgatccggcgcaagcggttcgaggatctgccggtcgaggtgctcgacttcatcgacggctatgtcttcctctccgaggagacgccggcgttcatcgccaagaatttgatcagccggctcaagcaatatgccgagacgctcaagacgccgttcttcggcacgctggtcgactatgccgaggaaggcaaccagctctggacctgtcccgggcacaatggcggcgtattctacagccgcagcccgatcgggcggatcttcgtcgagcatttgggcgaggcggtgttccgcgacgacctcgacaattccgtgctcgacctcggcgatctcctcacccatgaagggccggcgctgcgcgcgcagaaggaggcggctcagatcttcggcgccgagaagacctatttcgtgctcaacggcacctcgacctccaacaaggtcgtgctgggggcgctggtcaccgacggcgaccttgtgcttttcgaccgcaacaaccacaaggccgcccatcacggagccctgctgatctccggcggaatcccggtctatgtgcccaccgtccgcaacgcctggggcctgatcgggccaatgcgctgggacctcctcgacgaggagcacctgcggcagcagatccgcaacaatccgctcgtcaaggaccccgatgcctggcgcaaggagcggccgttccgcgtcgccgtcgtcgaggagtgtacttacgacggcaccatccacagcgccgagatgatcctcaagcgcatcggccacctctgcgactacatcatgttcgacgaggcctgggccggcttcatgaagtttcacccgctctatgccggccgcttcgcgatgggcctctccgagctcgggccggacgcccccggaattatcgcgacgcagtcgacccacaagcagctcgcgagcttctcgcaggcctcgcagatccacatcaaggaccgccacatcaagggccagcgccgccgggtcgagcatcgccgcttcaacgagagcttcatgcagcacgcctcgacctcgcccttctatccgctgttcgcctcgctcgatgtcggcgcgcagatgatgaagggccgctcgggcgaggtgctgtgggacgacacgatccggctcgggatcgaattgcgcaagaagatccgggcgatgcgccgcgagttcgacgagaaggagaaggatccggcgcggcgctggttcttcgagccgttcgtgccggaccgggtgtcgatccccgatgccgcgagtcccggcggccgccacgacgtcgcttgggaggcgatctcgaccgaccagctcgcgaccgacgccacgctctggcagctcgcgccaggcgaggcctggcacggcttcccggacctcgcgcccggcttcgccatgaccgatccgaacaagctgaccctgctcacccccggtttcgaccgttccaccggcggctatgccgagcacggcataccggcgccggtcgtggcgcaatatctgcgcgagaatcgcatcgtcgccgagaagaacgacctcaactcgctgctcttcctgctcactcccggcgtcgaggccagcaaggccggcactttgattagcgggctcgtcgccttcaagcggctgcatgacgacaacgtgctgctcgacgacgccatccccgagttcacccgcaagcgcttcgcgcgctacggcaagacccggctgcgcgacctctgcggcgagatgcaccgcttctaccgcgaggccgaggtcagcgcgctgcaggcgaagcagtttcagccgcagcatctgcccgagatcgcgctgtcgccgcgcgaggcggcccgcgcgctgatgcgcaacgaggtcgactacctgccgatcgaccagatcgccggccgcatcgcgaccacccccttcgtggtttatccgccgggcatcgccacgatcgtccctggagagcggttgtccgatcgcgccaagccgatgatcgattacctcaagatgttcgagcgggcgttcaacacattccccggcttcgacgtcgagattcagggattgtataaggagatcgacgagtctggccggatccggctctatacctatgtctgcgcagagtaa

SEQ ID NO: 157330 - protein, 785 aa, Bradyrhizobium sp. ORS278
MDYFRRFTFLFAAPVFETDDLAGVRFNQIIEEIQRSGFEVVRARKLEDAEIAVQTDAAIGCMVVDWGKKGLEGKTASLINLMRRRGLDFPIILLIRRKRFEDLPVEVLDFIDGYVFLSEETPAFIAKNLISRLKQYAETLKTPFFGTLVDYAEEGNQLWTCPGHNGGVFYSRSPIGRIFVEHLGEAVFRDDLDNSVLDLGDLLTHEGPALRAQKEAAQIFGAEKTYFVLNGTSTSNKVVLGALVTDGDLVLFDRNNHKAAHHGALLISGGIPVYVPTVRNAWGLIGPMRWDLLDEEHLRQQIRNNPLVKDPDAWRKERPFRVAVVEECTYDGTIHSAEMILKRIGHLCDYIMFDEAWAGFMKFHPLYAGRFAMGLSELGPDAPGIIATQSTHKQLASFSQASQIHIKDRHIKGQRRRVEHRRFNESFMQHASTSPFYPLFASLDVGAQMMKGRSGEVLWDDTIRLGIELRKKIRAMRREFDEKEKDPARRWFFEPFVPDRVSIPDAASPGGRHDVAWEAISTDQLATDATLWQLAPGEAWHGFPDLAPGFAMTDPNKLTLLTPGFDRSTGGYAEHGIPAPVVAQYLRENRIVAEKNDLNSLLFLLTPGVEASKAGTLISGLVAFKRLHDDNVLLDDAIPEFTRKRFARYGKTRLRDLCGEMHRFYREAEVSALQAKQFQPQHLPEIALSPREAARALMRNEVDYLPIDQIAGRIATTPFVVYPPGIATIVPGERLSDRAKPMIDYLKMFERAFNTFPGFDVEIQGLYKEIDESGRIRLYTYVCAE

SEQ ID NO: 157331 - DNA, 2178 bp, Dichelobacter nodosus VCS1703A
  CDS (1)..(2178): transl_table=11
atgaaacatttgaaaattgctttttctgagaaagctatggtgttttctgatggagtcaaaagtcgtcagattatcaacgttgttgacacagatttttctgatgtagcagcgcttgttattactgatgaggatcaggagtttttagccaatggcaaattaaagtcatttaaaattcctgtgtttttgattaaaaccggcgacgtagcggttaaaaaagaatttattggtcgtatcgatcgcgtcattgatacatggcaatacactaatattgaattatatgctcgccaaattgaagctgcagctgataaatatgaagctaaaatgctcccgccatttttccgtgctttaagcaattatgtagaagccggtcactcacaattcgactgccccggacatcaaggtggacaattttatacacgtcacccagctggacgcgcgttttatgaattttacggtgaaaacttatttagaagtgacttgtgtaatgctgacgtcagattgggcgatttgttaattcacgaaggtcctgcatgtgatgcacaacaacacgccgcacaagtttataacgctgataaaacttatttcgtacttaacggtacatcatcagccaataaaatggtgctcaatgcattactcgctccgggtgatatggttctttatgatcgcaataaccataaatctgtttgccacggtgcgctcgttcaagcaggagcaacacccgtttatttagaaaccgcacgcaatccgtttggttcaattggcggtattttggaacattgttttgatgaaacttatatccgcaaattagtcgctgaaaaaaatgccgaaaaagccaaagcaaaacgtccgattcgtttggcagtcattcaattaggaacttacgacggtactatttataacgcacgctatgtaattgataaaattggtcatttatgtgactacattttatttgactctgcttgggtgggttatgaacaattcattccgatgatgaaggattgcagcccgttattattagaacttggacccgatgatcctggtgttttggtaacacaatctgtgcacaaacaacaagctggtttttctcaagcctctcaagtacacaaaaaagacgcccacatcaaaggacaagatcgttatgttaatcataaacgtttgaataacgcatttatgatgcatgcttcaacttctcctttctatccgatttttgcttctctcgacgtaaacgcaaaaatgcatgaaggcggcgccggacttgaaatttggaaagattgcgtagaagtgaccattgaagctcggaaagcaattttaaagaattgtaaatacattcgaccaatggttccgcccgttgttaacggtaaaaaatgggaagatggcgataccgcgaaaatggcgcaagatatttcttactttgcctttgagccgggcgccaattggcactctttcgaagggtacggaaaaggtcaatacttcatcgatccctgcaaattcttgttaacaacaccgggtattaacgttgaaactggaaaatatgaagatttcggtatccacgcaaatattttagccaactatttacgtgaaaacggcattgttccagaaaaatgcgacttaaataccattttattcctgatgacgccggcagaaaccaaaaccaagatggacgatttagttgctcaattaatccgctttgaacaattaattgaagcaaatgtgccaatgcaagacgtattgccaagcatttattatgccaatattgaaaaatataaaggctaccgtattcgtcaactttgccaagaaatgcatgatttctacaaagaaagaaaagtcagcgaattgcaaaaacgtttgttcttgaaagactatttaccagaatacgtcatgactcctcaggaagcgaactttgcttttgtacgcggtgaaggcgaattggtcgcattaagtgatgcggtaggacgtatggctctagaaggttctttaccttatccaccgggtgttatttgtgtacaacctggcgaaagatggtctgaaaccgcgcaaaaatacttcttagcacttgaagaaggtattaataaattgcctggttttgcgccagaaattcaaggcgtctatcttgttactcaagaagatggaacgaaaaaagcatacggctatgttttaaaatctgaattagataaataa

SEQ ID NO: 157332 - protein, 725 aa, Dichelobacter nodosus VCS1703A
MKHLKIAFSEKAMVFSDGVKSRQIINVVDTDFSDVAALVITDEDQEFLANGKLKSFKIPVFLIKTGDVAVKKEFIGRIDRVIDTWQYTNIELYARQIEAAADKYEAKMLPPFFRALSNYVEAGHSQFDCPGHQGGQFYTRHPAGRAFYEFYGENLFRSDLCNADVRLGDLLIHEGPACDAQQHAAQVYNADKTYFVLNGTSSANKMVLNALLAPGDMVLYDRNNHKSVCHGALVQAGATPVYLETARNPFGSIGGILEHCFDETYIRKLVAEKNAEKAKAKRPIRLAVIQLGTYDGTIYNARYVIDKIGHLCDYILFDSAWVGYEQFIPMMKDCSPLLLELGPDDPGVLVTQSVHKQQAGFSQASQVHKKDAHIKGQDRYVNHKRLNNAFMMHASTSPFYPIFASLDVNAKMHEGGAGLEIWKDCVEVTIEARKAILKNCKYIRPMVPPVVNGKKWEDGDTAKMAQDISYFAFEPGANWHSFEGYGKGQYFIDPCKFLLTTPGINVETGKYEDFGIHANILANYLRENGIVPEKCDLNTILFLMTPAETKTKMDDLVAQLIRFEQLIEANVPMQDVLPSIYYANIEKYKGYRIRQLCQEMHDFYKERKVSELQKRLFLKDYLPEYVMTPQEANFAFVRGEGELVALSDAVGRMALEGSLPYPPGVICVQPGERWSETAQKYFLALEEGINKLPGFAPEIQGVYLVTQEDGTKKAYGYVLKSELDK

SEQ ID NO: 157333 - DNA, 2163 bp, Pasteurella multocida subsp. multocida str. Pm70
  CDS (1)..(2163): transl_table=11
atgctaaatttaaaaattgcatatagcccattaattcgaccttattttcatacaaatagagaactcgtttctgttcaagaaacagatttcaccgacattggtgcaattatcctgagttctgaagatattgaagattatattgatagtatacaagcaactgaatttaatattccggtctttgttgctgtcattgaaggtcaatttttagatcctcaattctttgacaaagtctatcacgttcaagatctcaacaactacgacatcaacctatacagtcgccaaattgaaactgcggcgcggttttacgaagaaaaaatcctcccacctttctttaaaatgctaagtgaatatgtggaaatggggaattctgcttttgattgtccgggacaccaaggtggacaatatttccgtaaacatcctgcaggacgttatctctatgatttctacggtgaaaatattttccgctcagatatctgtaatgccgatgtaaaattaggcgatttgctaatccatgaaggagccgcttgtgatgctcaaaaacacgctgctcaagtctttaatgctgataaaacctacttcgtcttaaatgggacatcttctgcaaataaagtcgtcaccaatgcgttactcacaccgggtgatcttgtgctctttgatcgtaacaatcacaaatctatccatcacggtgcattaattcaagctggtgctacccctgtttatttggaaactgcgcgtaatccatttggttttatcggtgggatcgatagccattgttttgatgaagattatttgaaatctttaattaaagatgttgcgcctgaaaaactaacacaagcacgtcctttccgtttagccgttattcagctcggcacttatgacggaaccatctataatgcgcgccaagtcgtagataaaattggtcatttatgtgactacatcttgtttgattctgcgtgggtaggttatgaacaattcattccaatgatgaaagattgctcaccgctcttgcttgaattaaatgaaaatgatcccggcatcatcgtgacacaatcagtacacaaacaacaagccggcttctcacaagcctcacaaattcacaaaaaagacaagcacattaaaggtcaacagcgctactgtaatcataaacgctttaataatgcattcatgttacacgcctccaccagcccattctaccctctttttgccacacttgatgtcaatgcaaaaattcaaggtacccctgcgggtattcgtttatggcatgactgtgtcaaaatcgggatagaagcacgtaaaatggtgctgaatagttgtgatctgatcaaaccgtttattccgccttatgtcaatggcaaaaaatggcaagactacgatacagaagaaatggcaaatgatttaacattcttcaaattccatgctgatgataaatggcatcaatttgaaggctatgtagataaccaatattttgttgatccatgtaaattcatgctaacgacgccgggtattgatattgaaacaggtgaatacgaagacttcggtgtccctgctacgattcttgctaattatttacgtgaaaacggcattattccggaaaaatgtgacttaaactcaattctcttcttattaacgccagcagaaaccctcaccaaaatgcaaagtttggttgcacaaattgcggcatttgaacaacacatcaaaaaagattccttactaaaagaagtcttaccaagtgtttatcacaacaatgaaaaacgctatgaaggttataccatccgtcgtctttgccaagaaatgcatgatttgtatgtcagccgtaacgtgaaaactttacaacgcaacttattcagaaaagcgaccttgcctgaatatgtgatgaatccacatcaagctaatcttgaatttgttcgtaatcgtgtagaactggttccactaaccgaaatcgttaatcgcattgcggcagaaggagcacttccttatccaccgggtgtgctttgtgtcgtaccgggtgaaaaatggagtcagactgcacaggaatatttcttagcactcgaagaaggcattaatttattaccaggtttcgcaccagaaattcaaggggtatatctacaacaagatgcagatggacgtattcgtgcttatggctacgtattaactgaaaactaa

SEQ ID NO: 157334 - protein, 720 aa, Pasteurella multocida subsp. multocida str. Pm70
MLNLKIAYSPLIRPYFHTNRELVSVQETDFTDIGAIILSSEDIEDYIDSIQATEFNIPVFVAVIEGQFLDPQFFDKVYHVQDLNNYDINLYSRQIETAARFYEEKILPPFFKMLSEYVEMGNSAFDCPGHQGGQYFRKHPAGRYLYDFYGENIFRSDICNADVKLGDLLIHEGAACDAQKHAAQVFNADKTYFVLNGTSSANKVVTNALLTPGDLVLFDRNNHKSIHHGALIQAGATPVYLETARNPFGFIGGIDSHCFDEDYLKSLIKDVAPEKLTQARPFRLAVIQLGTYDGTIYNARQVVDKIGHLCDYILFDSAWVGYEQFIPMMKDCSPLLLELNENDPGIIVTQSVHKQQAGFSQASQIHKKDKHIKGQQRYCNHKRFNNAFMLHASTSPFYPLFATLDVNAKIQGTPAGIRLWHDCVKIGIEARKMVLNSCDLIKPFIPPYVNGKKWQDYDTEEMANDLTFFKFHADDKWHQFEGYVDNQYFVDPCKFMLTTPGIDIETGEYEDFGVPATILANYLRENGIIPEKCDLNSILFLLTPAETLTKMQSLVAQIAAFEQHIKKDSLLKEVLPSVYHNNEKRYEGYTIRRLCQEMHDLYVSRNVKTLQRNLFRKATLPEYVMNPHQANLEFVRNRVELVPLTEIVNRIAAEGALPYPPGVLCVVPGEKWSQTAQEYFLALEEGINLLPGFAPEIQGVYLQQDADGRIRAYGYVLTEN

SEQ ID NO: 157335 - DNA, 2256 bp, Pseudomonas aeruginosa PAO1
  CDS (1)..(2256): transl_table=11
atgtataaagacctcaaatttcccgtcctcatcgtccatcgcgacatcaaggccgacaccgttgccggcgaacgcgtgcggggcatcgcccacgaactggagcaggacggcttcagcattctctccaccgccagctccgccgaggggcgcatcgtcgcttccacccaccacggcctggcctgcattctggtcgccgccgaaggtgccggggaaaaccagcgcctgctgcaggatgtggtcgaactgatccgcgtggcccgcgtgcgggcgccgcaattgccgatcttcgccctcggcgagcaggtgaccatcgagaacgcgccggccgagtccatggccgacctgcaccagttgcgcggcatcctctacctgttcgaagacaccgtgccgttcctcgcccgccaggtcgcccgggcggcgcgcaactacctggccgggctgctgccgccattcttccgtgcgctggtcgagcacaccgcgcagtccaactattcctggcatacgccgggccacggcggcggtgtcgcctatcgcaagagtccggtgggacaggcgttccaccagttcttcggggagaacacgctgcgttccgacctgtcggtctcggtccccgagctgggatcgctgctcgaccataccggccccctggccgaggccgaggaccgtgccgcgcgcaatttcggcgccgaccataccttcttcgtgatcaatggcacttccaccgcgaacaagatcgtctggcactccatggtcggtcgcgaagacctggtgctggtggaccgcaactgccacaagtcgatcctccactcgatcatcatgaccggggcgataccgctctacctgactccggaacgcaacgaactggggatcatcgggccgatcccgctgagcgaattcagcaagcagtcgatcgccgcgaagatcgccgccagcccgctggcgcgcggccgcgagccgaaggtgaagctggcggtggtgactaactccacctacgacggcctgtgctacaacgccgagctgatcaagcagaccctcggcgacagcgtcgaggtgttgcacttcgacgaggcttggtacgcctatgccgcgttccacgagttctacgacggacgctatggcatgggcacctcgcgcagcgaggagggacccctggtgttcgccacccactccacgcacaagatgctcgccgccttcagccaggcctcgatgatccacgtgcaggatggcgggacccggaagctggacgtggcgcgcttcaacgaagccttcatgatgcacatctcgacctcgccgcagtacggcatcatcgcttcgctggacgtggcttcggcgatgatggaagggcccgccgggcgttcgctgatccaggagaccttcgacgaggccctcagcttccgccgggccctggccaacgtacggcagaacctggaccggaacgactggtggttcggcgtctggcagccggagcaggtggagggcaccgaccaggtcggcacccatgactgggtgctggagccgagcgccgactggcacggcttcggcgatatcgccgaagactacgtgctgctcgacccgatcaaggtcaccctgaccaccccgggcctgagcgctggcggcaagctcagcgagcaggggattccggccgccatcgtcagccgcttcctctgggagcgcgggctggtggtggagaaaaccggtctctactccttcctggtgctgttctcgatgggcatcaccaagggcaagtggagcaccctggtcaccgaactgctcgaattcaagcgctgttacgacgccaacctgccgctgcttgacgtcttgccctccgtggcccaggccggcggcaagcgctacaacggagtgggcctgcgcgacctcagcgacgccatgcacgccagctaccgcgacaacgccacggcgaaggccatgaagcgcatgtacacggtgctgccggaggtcgcgatgcggccgtccgaggcctacgacaagctggtgcgcggcgaggtcgaggcggtaccgatcgctcggttggaagggcgcatcgcggccgtcatgctggtaccctatccgccgggtatcccgctgatcatgccgggtgagcgcttcaccgaggcgacccgctcgatcctcgactatctcgagttcgcgcggaccttcgagcgcgccttccctggtttcgactccgatgtgcatggcctgcagcatcaggacggaccgtccgggcgctgctataccgttgaatgcataaaggaatga

SEQ ID NO: 157336 - protein, 751 aa, Pseudomonas aeruginosa PAO1
MYKDLKFPVLIVHRDIKADTVAGERVRGIAHELEQDGFSILSTASSAEGRIVASTHHGLACILVAAEGAGENQRLLQDVVELIRVARVRAPQLPIFALGEQVTIENAPAESMADLHQLRGILYLFEDTVPFLARQVARAARNYLAGLLPPFFRALVEHTAQSNYSWHTPGHGGGVAYRKSPVGQAFHQFFGENTLRSDLSVSVPELGSLLDHTGPLAEAEDRAARNFGADHTFFVINGTSTANKIVWHSMVGREDLVLVDRNCHKSILHSIIMTGAIPLYLTPERNELGIIGPIPLSEFSKQSIAAKIAASPLARGREPKVKLAVVTNSTYDGLCYNAELIKQTLGDSVEVLHFDEAWYAYAAFHEFYDGRYGMGTSRSEEGPLVFATHSTHKMLAAFSQASMIHVQDGGTRKLDVARFNEAFMMHISTSPQYGIIASLDVASAMMEGPAGRSLIQETFDEALSFRRALANVRQNLDRNDWWFGVWQPEQVEGTDQVGTHDWVLEPSADWHGFGDIAEDYVLLDPIKVTLTTPGLSAGGKLSEQGIPAAIVSRFLWERGLVVEKTGLYSFLVLFSMGITKGKWSTLVTELLEFKRCYDANLPLLDVLPSVAQAGGKRYNGVGLRDLSDAMHASYRDNATAKAMKRMYTVLPEVAMRPSEAYDKLVRGEVEAVPIARLEGRIAAVMLVPYPPGIPLIMPGERFTEATRSILDYLEFARTFERAFPGFDSDVHGLQHQDGPSGRCYTVECIKE

SEQ ID NO: 157337 - DNA, 2199 bp, Escherichia coli O157:H7 EDL933
  CDS (1)..(2199): transl_table=11
  misc_feature (837)..(837): r is g or a
  misc_feature (1194)..(1194): s is g or c
atgtcagaattaaaaattgccgttagtcgttcttgcccggattgtttttccactcatcgtgcatgcgtgaatatagacgaaagtaattatattgacgttgccgccattattttatcagtcagtgatgttgaacgtggaaaactcgatgaaatagacgctactggctatgacattcctgtttttattgcaacggaaaatgaagaacgtataccagcagaatatctttcacgtatttctggtgtcttcgaacatggagaagcacgcaaagaattttatggtcgtcagttagaaaccgctgccagccattatgaaactcaactgcgcccacctttctttcgcgcactggtcgattatgtcaatcagggcaacagcgcatttgactgccccggtcatcagggcggcgaatttttccgtcgccatccggcggggaatcagtttgtggaatactttggtgaggcgctgttccgtgccgacttgtgcaacgccgacgtagcgatgggcgatctgctgattcacgaaggcgcgccatgcattgcacagcaacatgcagcaaaagtgtttaatgccgataaaacctacttcgttttaaatggcacttcatcttctaacaaagtggttttaaacgccctgctgacaccgggtgatctggtgctatttgaccgcaataaccataagtctaaccaccacggggccttgctacaggctggtgcaacaccggtttatctggaaacagcacgtaacccgtatggttttatcggtggtattgatgcacactgcttcgaagaaagttatctgcgtgaactgattacagaagttgcaccgcaacgggcaaaagargcgcgtccgttccgcctcgctgtgattcagctaggcacctacgacggtacgatttataacgcccgccaggtggtggataaaattggtcatctgtgtgactacatcctgtttgattccgcatgggtcggctatgaacagtttattccgatgatggctgactgttcgccgctgttgctggatcttaatgagaacgatccgggtattctggttacgcaatccgtacataaacagcaggctggtttttctcaaacttcacaaatccataaaaaagacagccacatcaaagggcaacagcgttatgtaccgcacaaacgcatgaacaacgcctttatgatgcatgcctccaccagcccgttstatccgctgtttgccgcactggatatcaacgccaaaatgcatgaaggtgtcagcggtcgtaatatgtggatggattgtgtggtaaatggcattaatgcccgcaaactgatcctcgataactgtcagcatattcgtccgttcatacctgaactggtggatggtaaaccctggcagtcgtatgaaacagcgcaaattgcggttgatctgcgcttcttccagtttgtaccaggtgagcactggcattcttttgaaggctatgcagagaatcaatactttgttgatccgtgcaaactgttgctgacaaccccaggtattgatgcacgtaacggcgaatatgaagcgttcggtgtacccgcgacgattcttgctaacttcctgcgcgaaaatggcgtagtgccggaaaaatgcgatcttaactccatcctcttcctgctgactccggcagaagatatggccaaacttcagcaacttgttgccctgctggtacgcttcgaaaaactgctggaatctgatgcgccgctggcggaagtgctaccttccatctacaaacagcatgaagagcgctacgccggttatacccttcgtcagttgtgccaggaaatgcatgatttgtatgcccgccacaacgtgaaacaactgcaaaaagagatgttccgtaaggaacacttcccacgcgtcagcatgaatccgcaagaagctaactacgcctatttacgcggtgaagtggagctggttcgtctgccggatgcagaaggccgtatcgctgccgaaggtgcgcttccttatcctccgggtgtgctgtgtgttgttccgggtgaaatctggggtggtgctgttttgcgttacttcagcgctctggaagaagggatcaacctgctgccaggttttgcaccggagctgcagggtgtctatatcgaagaacatgatggtcgtaagcaagtttggtgctatgtcatcaagcctcgtgatgcgcaaagcaccctgctgaaaggggaaaaattatga

SEQ ID NO: 157338 - protein, 732 aa, Escherichia coli O157:H7 EDL933
  misc_feature (398)..(398): The Xaa at location 398 stands for Leu, or Phe.
MSELKIAVSRSCPDCFSTHRACVNIDESNYIDVAAIILSVSDVERGKLDEIDATGYDIPVFIATENEERIPAEYLSRISGVFEHGEARKEFYGRQLETAASHYETQLRPPFFRALVDYVNQGNSAFDCPGHQGGEFFRRHPAGNQFVEYFGEALFRADLCNADVAMGDLLIHEGAPCIAQQHAAKVFNADKTYFVLNGTSSSNKVVLNALLTPGDLVLFDRNNHKSNHHGALLQAGATPVYLETARNPYGFIGGIDAHCFEESYLRELITEVAPQRAKEARPFRLAVIQLGTYDGTIYNARQVVDKIGHLCDYILFDSAWVGYEQFIPMMADCSPLLLDLNENDPGILVTQSVHKQQAGFSQTSQIHKKDSHIKGQQRYVPHKRMNNAFMMHASTSPXYPLFAALDINAKMHEGVSGRNMWMDCVVNGINARKLILDNCQHIRPFIPELVDGKPWQSYETAQIAVDLRFFQFVPGEHWHSFEGYAENQYFVDPCKLLLTTPGIDARNGEYEAFGVPATILANFLRENGVVPEKCDLNSILFLLTPAEDMAKLQQLVALLVRFEKLLESDAPLAEVLPSIYKQHEERYAGYTLRQLCQEMHDLYARHNVKQLQKEMFRKEHFPRVSMNPQEANYAYLRGEVELVRLPDAEGRIAAEGALPYPPGVLCVVPGEIWGGAVLRYFSALEEGINLLPGFAPELQGVYIEEHDGRKQVWCYVIKPRDAQSTLLKGEKL

SEQ ID NO: 157339 - DNA, 2196 bp, Escherichia coli O157:H7 EDL933
  CDS (1)..(2196): transl_table=11
atggggcagggttttacaccttgtccagtattcttacttccccgaaacgggtttgcgcttatgaaatcaatgaatattgccgccagtagtgaactggtatcccgactttctactcatcgccgcgtggtggcgttgggagatactgattttacggacgtcgcggcagtcgtcattaccgctgcggatagtcgcagtggcattcttacgttgcttaagcgcaccggttttcatctaccggtgtttttgtattccgaacatgctgttgaattacctgcgggcgttacggcggtaatcaacggcaacgagcagcagtggctggagctggaatccgcagcctgtcagtatgaagagaatttgctgccaccgttttatgacacgctgacgcagtacgttgagatgggcaacagcacctttgcttgccctggacatcaacatggtgcgttctttaaaaagcatcctgccggacgccatttttacgatttctttggtgagaacatctttcgcgccgatatgtgtaacgctgacgtaaaattgggcgatctgcttattcatgaaggatcggcgaaagatgcgcagaaattcgcagccaaagtctttcatgccgataaaacctattttgtgctgaacggcacatcggcagcgaataaagtggtgacgaatgcgctgttaacgcgtggcgatctggtgctctttgaccgtaacaaccataagtcgaatcatcacggcgcgttgattcaggcgggggcgacgccggtctatctggaagcttcacgtaacccgtttggtttcattggcggtattgatgcgcactgttttaatgaagagtatctgcgccagcaaattcgcgacgttgcgccagaaaaagccgacctgccgcgcccgtttcgcctggcgattattcagctgggaacctatgacggcactgtctataacgcccgtcaggtgatcgataccgttgggcatctgtgtgattacattctgtttgattccgcgtgggtcggttatgaacaatttatcccgatgatggcggatagctcgccgctgctgttagaacttaacgaaaacgatccggggatctttgtgactcagtcggtgcacaaacagcaggcgggattctcacagacgtcgcagatccataaaaaagataaccatatccgcggacaggcgcgtttttgcccgcataagcggttgaataacgcctttatgctccatgcttctaccagccctttctatccgctgtttgctgcactggatgttaacgccaaaattcatgaaggggagagtgggcgtcggctgtgggctgagtgcgttgagttgggtattgagtcgcgcaaggctattcttgcgcgctgtaagctgttccgcccgtttatcccgcccgttgttgatggcaaattgtggcaggattatccgacatcagtgttagccagcgaccgtcgttttttcagttttgagccgggggcgaagtggcacggctttgaaggatatgccgcggatcagtattttgttgatccgtgcaagctgttactcactacaccaggtatcgatgccgaaaccggcgaatatagcgactttggcgttccggcgacgattctggcgcactatctgcgtgagaacggcattgtgccggagaagtgcgatctcaattccattctgttcttattaactccggcggaaagccacgagaagctggcacaactggtggcgatgctggctcaatttgaacagcatattgaggatgactcgccgctggctgaggtgttgccgagcgtttataacaaatatccggtgcgctatcgcgactacaccctgcgccagttgtgtcaggagatgcacgatctgtatgtcagtttcgacgtcaaagacctacaaaaagcgatgttccgccagcagagtttcccgtcagtggtgatgaacccccaggatgcgcatagcgcttatattcgcggtgacgtggagttggtgcggattcgtgatgccgaagggcgaattgcggcagaaggggcgttgccttatccacctggcgtgctttgcgtggtacccggggaagtctggggtggggcggttcaacgttatttccttgcactggaagaaggggtgaatttgttgccgggattttcgccggagctgcaaggtgtttatagcgaaaccgatgcggatggcatgaaacggttgtacggttatgtgttgaagtaa

SEQ ID NO: 157340 - protein, 731 aa, Escherichia coli O157:H7 EDL933
MGQGFTPCPVFLLPRNGFALMKSMNIAASSELVSRLSTHRRVVALGDTDFTDVAAVVITAADSRSGILTLLKRTGFHLPVFLYSEHAVELPAGVTAVINGNEQQWLELESAACQYEENLLPPFYDTLTQYVEMGNSTFACPGHQHGAFFKKHPAGRHFYDFFGENIFRADMCNADVKLGDLLIHEGSAKDAQKFAAKVFHADKTYFVLNGTSAANKVVTNALLTRGDLVLFDRNNHKSNHHGALIQAGATPVYLEASRNPFGFIGGIDAHCFNEEYLRQQIRDVAPEKADLPRPFRLAIIQLGTYDGTVYNARQVIDTVGHLCDYILFDSAWVGYEQFIPMMADSSPLLLELNENDPGIFVTQSVHKQQAGFSQTSQIHKKDNHIRGQARFCPHKRLNNAFMLHASTSPFYPLFAALDVNAKIHEGESGRRLWAECVELGIESRKAILARCKLFRPFIPPVVDGKLWQDYPTSVLASDRRFFSFEPGAKWHGFEGYAADQYFVDPCKLLLTTPGIDAETGEYSDFGVPATILAHYLRENGIVPEKCDLNSILFLLTPAESHEKLAQLVAMLAQFEQHIEDDSPLAEVLPSVYNKYPVRYRDYTLRQLCQEMHDLYVSFDVKDLQKAMFRQQSFPSVVMNPQDAHSAYIRGDVELVRIRDAEGRIAAEGALPYPPGVLCVVPGEVWGGAVQRYFLALEEGVNLLPGFSPELQGVYSETDADGMKRLYGYVLK

SEQ ID NO: 157341 - DNA, 2349 bp, Sinorhizobium meliloti 1021
  CDS (1)..(2349): transl_table=11
gtgaaggctccgaccgtccccattccattccacaagctgctcaaggtcgtggcattcgtcgacgaaagcaatctggaaacgaagagacttcttgcgcacattgtcgcggaaaatttcgaagtcgagttgcgcggcagctataacgccgacgtgtccgaggacgcttcggttggtgcctatattgggacggtcgagggcggacggctcgaagatgcccgcaagttcgtccgtgcggtcagagacatcggattccgcacgccgctatgggccctcgcagactcccacggcattgcggacattgcggcgattaaaatggccggtgaagtggacggcttcgtttatcttgggcagcagacaccggcgttctacgcaaagcagatcatttcaagtctggtcaattacggcaagacgctcctcccgccgtttttcggcggcctcatggcttacgatggagaagccaacatcgcgttcgactgtccaggacaccaaggcggacagttttaccggaagtcgcccgcaggccagctctttttcaattatttcggcgaaagcatatttcgcgccgatctttgcaatgccgacgtcgaccttggcgacctgctaatccatgaagggccggcggccgaggcgcagaagaatgcggcaaggattttcggcgcggaccggacctacttcattctgaacggcacaagcacatcgaacaaagtggttacgaacgcggtactgcgcgcaggcgacctcgtgttgttcgaccgcaacaatcacaaatcgcttcatcagggcgcgctggtgcaggcgggagcgataccagtttacctgccgacctcacgcaactcgttcgggatgatcggtgccgtggactgggacgcctgggacgaagcgagcctgcgccggcagatcgaaaggcatcccctggtcgaggacaaggcgcgagccagtgcagagcgaccgttccgactcgcctgcatccaacttgcgacctatgacggcactatttacaacgtccgcaaggtgttggaacagatcggacacctgtgcgactacgtactctgggacgaggcgtggatcggctacaacgctttccacccgttgtttgaagaccacagtccgatgcggatcgacacgcttgatgccgaaatgccggggttgttctcaacgcaatccgtccacaagcaaggggcgggcttttcgcaagcctcgcagattcacaagcgcgacgagcacatccgtgatcagcgccgctacgtcgaacataagcgcttcaacgagtcgcttctcatgcatgtttcgacttcaccattctacccgctattcgcctcgttggacgtcaatgccaagatccacgagggcaaggctggtgaaatgctctgggatcgctgtatcgagctgggtatcgaggcacgcaagaagctcagagaattcacccggtactacgagtcgtcgggtgcggggccccaggagcagtggttcttcgaccccttcgtacccgatgtggtcacgatctcgggctccaaacataccgaggatgttgtcgagtcccgttgggaggcgctcccgacggaggtcatcaaacgggaacagcagtgctggcgcttccgtccaggggcttcatggcatggatattccggctactccgatggctacgcaatggtggatccaaacaagcttacgcttctcactccaggcatagaccgtgcgaccggggagtatcgagacttcggcatcccagcaacgatggttgccaattatcttcgcgaacagcgcatcgttcccgagaagtgcgacctcaacagcatactgtttctgctcacacctgccgaggacgagagcaagctcaacacgctgatagccaagttggtgaagttcaagaacttatgggatcgggacgcacctttggccgaggttctaccaaccgtgtttgcggcgaacagagagcgctatgcaggatacacactccggcaggtctgcgcagagatgcacgacttctatcggcaagcaggggtcaaggaattgcagcgcctctgcttcagggcggagagcatgcccgagcccgcaatgacgccgaaagcggcttatgaagccctcgtggcaaacgaagttgattatgtggcactcgacgaggctttcggcaggatttcggccacgctcgcgttgatctacccgccgggcataggcgtcatagtccccggggagcgctgggacgaaagggcgcggccgatgcacaactatttcctggcattccaagagtccttcaaccgcttccccggcttcaattacgaggtccagggtgtgtttcaggagcgcgttgacggccagatcaaattctacacctacgccgtgcgcgagtaa

SEQ ID NO: 157342 - protein, 782 aa, Sinorhizobium meliloti 1021
MKAPTVPIPFHKLLKVVAFVDESNLETKRLLAHIVAENFEVELRGSYNADVSEDASVGAYIGTVEGGRLEDARKFVRAVRDIGFRTPLWALADSHGIADIAAIKMAGEVDGFVYLGQQTPAFYAKQIISSLVNYGKTLLPPFFGGLMAYDGEANIAFDCPGHQGGQFYRKSPAGQLFFNYFGESIFRADLCNADVDLGDLLIHEGPAAEAQKNAARIFGADRTYFILNGTSTSNKVVTNAVLRAGDLVLFDRNNHKSLHQGALVQAGAIPVYLPTSRNSFGMIGAVDWDAWDEASLRRQIERHPLVEDKARASAERPFRLACIQLATYDGTIYNVRKVLEQIGHLCDYVLWDEAWIGYNAFHPLFEDHSPMRIDTLDAEMPGLFSTQSVHKQGAGFSQASQIHKRDEHIRDQRRYVEHKRFNESLLMHVSTSPFYPLFASLDVNAKIHEGKAGEMLWDRCIELGIEARKKLREFTRYYESSGAGPQEQWFFDPFVPDVVTISGSKHTEDVVESRWEALPTEVIKREQQCWRFRPGASWHGYSGYSDGYAMVDPNKLTLLTPGIDRATGEYRDFGIPATMVANYLREQRIVPEKCDLNSILFLLTPAEDESKLNTLIAKLVKFKNLWDRDAPLAEVLPTVFAANRERYAGYTLRQVCAEMHDFYRQAGVKELQRLCFRAESMPEPAMTPKAAYEALVANEVDYVALDEAFGRISATLALIYPPGIGVIVPGERWDERARPMHNYFLAFQESFNRFPGFNYEVQGVFQERVDGQIKFYTYAVRE

SEQ ID NO: 157343 - DNA, 2196 bp, Sinorhizobium meliloti 1021
  CDS (1)..(2196): transl_table=11
atgcgcagcctcgcagaggcgattgaaaaggaaggttatcgggtcgttgcagggctcacctatgaggatgcacgccgcctcgtgaacgtcttcaacaccgagtcctgctggctgatttcagtcgacgggacggaatcaagtacgacgcgctgggagattttagccgagctgctcgccgcgaaacgctcccggaacaacctgctgccaatctttctgtttggcgacgatacaacggcggaaatggtgccggcgcccgtgctgcgccacgccaatgcctttatgcgtcttttcgaggattctccggaattcatggcgcgcgcgatcgtgcgcgcggcgcagaattatcttgagaggcttccgcctccaatgttcaaggcgttgatggaatacacgcttcacggcgcctattcctggcacacgccagggcacggaggcggggtggcgtttcgcaagagcccggttggccagctcttttatacgttttttggagagaacacattgaggtcggacatttctgtgtccgtcggcagcgttggttcgctcctcgatcatgttgggccgattggcgagggtgagcgcaatgccgctcgcatatttggtgcggatgagacgctgttcgttgtcggcggcacctcgaccgccaataagatcgtgtggcagggtatggtcactcggaacgacctcgtcctctgcgaccgaaactgccataagtctatcctgcactcgctgattatgacgggtgcaacgccgatttacctgacgccctcacgcaacggcctcggcatcatcggaccgattgcgaaggagcagtttaccccagaggcaatcgcgcacaagatcgtcgccagtccgtttgccagtgagacgaacggtaaagtgcgcctgatggtagtgacaaactccacctatgatgggctctgctacaatgtagatggaatcaaatcggcgctcggcgatgcggtggaggtactgcatttcgacgaggcctggtttgcttacgccaattttcacgaattctacgatggttatcacgcgatctcttcaacgaagcccgcgcgctcgcaagaagccatcacattcgcaacccagtccacgcacaagctgctggccgccttctctcaagcttcaatgcttcatgtgcagcatgccgtggcgaagcaactcgacatcacacgcttcaacgaagcgttcatgatgcacacatcgacatcgccgcaatatgggatcatcgcctcgtgcgacgtggctgctgccatgatggagcagcccgccgggcgggcgctggtacaggagaccattgacgaagccatgagtttccgccgagccgtcaacgccgtgcggacacagatgcaggattcctggtggttcgaagtctgggagccccccatcgcggatcgggccccgagcgacgccacgtcggattggcttctaaagcccggtgacgcttggcatggtttcgaagacctggctgagaatcacgttatggttgacccgatcaaggtcacgatcctttcgcccggactcaatgcgggcggagcgatgctggagcatggtattccggctgcagtcgtcacgaagttcctttcttctcgccggatcgaaatcgagaaaaccggcctctactctttcctggtgctcttctccatggggatcacacggggcaagtggagcaccctgatcaccgagctcttgaacttcaaagacctctatgatgccaatgcgcctctttcacgcgcccttcccgccctcgcggcagcccatccggacgtctaccgtgcaatgggccttagagatctttgcgagaaaattcacgacgtgtaccgcagcgatggcgtgccgaatgcccagcgcgagatgtacaccgtgctacccgaaatggcactgcgcccggcagacgcctacaaccgcctggtcaaggggtgcgtcgaaagcgtcgatatcgacgaattgatcggccggacactcgcagtcatgattgtaccctatcctccgggcatcccgctcatcatgcctggcgagcggatcactgcagccacaagatcgatccaggactatctcgtctacgcccggagtttcgacaggaaattcccgggatttgagacggacatccacggactccgtttcgtcgctaacccgagtggacggagatatctcgtggattgcatcgtcgaggagggacaagatgataccgcgtga

SEQ ID NO: 157344 - protein, 731 aa, Sinorhizobium meliloti 1021
MRSLAEAIEKEGYRVVAGLTYEDARRLVNVFNTESCWLISVDGTESSTTRWEILAELLAAKRSRNNLLPIFLFGDDTTAEMVPAPVLRHANAFMRLFEDSPEFMARAIVRAAQNYLERLPPPMFKALMEYTLHGAYSWHTPGHGGGVAFRKSPVGQLFYTFFGENTLRSDISVSVGSVGSLLDHVGPIGEGERNAARIFGADETLFVVGGTSTANKIVWQGMVTRNDLVLCDRNCHKSILHSLIMTGATPIYLTPSRNGLGIIGPIAKEQFTPEAIAHKIVASPFASETNGKVRLMVVTNSTYDGLCYNVDGIKSALGDAVEVLHFDEAWFAYANFHEFYDGYHAISSTKPARSQEAITFATQSTHKLLAAFSQASMLHVQHAVAKQLDITRFNEAFMMHTSTSPQYGIIASCDVAAAMMEQPAGRALVQETIDEAMSFRRAVNAVRTQMQDSWWFEVWEPPIADRAPSDATSDWLLKPGDAWHGFEDLAENHVMVDPIKVTILSPGLNAGGAMLEHGIPAAVVTKFLSSRRIEIEKTGLYSFLVLFSMGITRGKWSTLITELLNFKDLYDANAPLSRALPALAAAHPDVYRAMGLRDLCEKIHDVYRSDGVPNAQREMYTVLPEMALRPADAYNRLVKGCVESVDIDELIGRTLAVMIVPYPPGIPLIMPGERITAATRSIQDYLVYARSFDRKFPGFETDIHGLRFVANPSGRRYLVDCIVEEGQDDTA

SEQ ID NO: 157345 - DNA, 2199 bp, Salmonella typhimurium LT2
  CDS (1)..(2199): transl_table=11
atgtcagaattaaaaattgccgttagccgtcattgcccggattgtttttctacacaccgtaatattgtaaatgttgatgagagtcgtttcatcgacgtggctgccatcgtgttatccattgacgacattgaacacggaaaactcgatgaaatcgacgcaacgggttacggtattcccgtgtttgtcgcgacacatgacgaagggcgcgtaccgcctgagtatttgccgcgtatctctggtgtattcgaatataatgaatcccgtactgccttctatggtcgccagttggaaaccgcagcaagccactacgaaacgcagttacgtccgccgtttttccgcgcgctggtggattatgtcaaccagggcaacagcgcatttgactgcccggggcatcagggcggcgaattcttccgccgtcatcctgccggtaatcagttcgtggaatactttggcgaaacgctcttccgctccgacctatgcaacgcggacgtggcgatgggcgatctgctgattcacgaaggcgcgccttgcattgcgcagcaacatgcggcgaaagtctttaacgccgataagacctactttgtgctgaacgggacctcctcctctaacaaagtcgtactcaacgcgctgttaacgccgggcgatctggtactgtttgaccgtaacaaccacaaatctaaccaccacggcgcattattgcaggcgggcgcaacgccagtttatctggaaaccgcgcgtaacccgtatggttttatcggcgggatcgacgctcactgcttcgaagaagattacctgcgcgagctgattagcgaagtcgcgccgcagcgtgcccgcgaagcacgtccattccgtctggccgtcatccagttaggcacctacgacggtaccatttataacgcccgtcaggtcgtcgataaaattggtcatctgtgcgactacatcctgtttgactccgcctgggtcggctatgaacaatttattccgatgatggccgattgttcgccgctgctgctggaactgaacgaaaacgatccgggtattctggtgacgcagtccgttcacaaacaacaagccggtttctcccagacctcgcagatccataaaaaagatagccatatcaaagggcaatcgcgctacgttccgcataagcgcatgaacaacgcctttatgatgcacgcctccaccagcccgttctatccgctgttcgccgcgctggacgttaacgccaaaatgcacgaaggcgtcagcggtcgcaatatgtggatggattgcgtggttaacggcatcgatgcccgtaaattgatcctcgaaaactgtcatcacatccgtccgttcgtaccggaactgattgatggtaagccgtggcagtcatacccgacgtcagagatcgccagcgatctgcgcttcttccacttcgttccgggagaacactggcatgcgtttgaaggctatgccgaacatcagtactttgtcgacccttgcaaactgctgctcaccacaccgggcattaatgcagcgagcggcgaatatgaagactttggcgttcctgccacgatcctcgccaacttcctgcgcgagaacggcgttgtgccggaaaaatgcgacctcaactccattctgttcctgctgacgccggcagaagacatggcgaagttacaacagcttgtcgccctgctggctcgtttcgaaaaactgctggaagctgatgcgccgttagcggaagtattaccgtccatctacaaacagcatgaagcgcgttatgccggctataccctgcgtcagctttgccaggagatgcacgatctctatgcgcggcacaacgtgaaacagctgcaaaaagagatgttccgtaaatcgcatttcccgaaagtcagtatgaatccgcaagaggccaactatgcctatctgcgcggcgaggtcgaactggttcgcctgccggaagcggaaggtcgtatcgcggctgaaggcgctctgccttacccgccgggagtgctgtgtgtagttccgggtgaaatctggggcggttctgtcctgcgttacttcagcgccctggaagaagggatcaacctgctgccgggctttgcgcctgaactgcagggcgtttatatcgaagaacacgacggccgtaagcaggtctggtgctacgtcattaaacctcgtgacgcacagcgctccctgctgaaggaggaaaaattatga

SEQ ID NO: 157346 - protein, 732 aa, Salmonella typhimurium LT2
MSELKIAVSRHCPDCFSTHRNIVNVDESRFIDVAAIVLSIDDIEHGKLDEIDATGYGIPVFVATHDEGRVPPEYLPRISGVFEYNESRTAFYGRQLETAASHYETQLRPPFFRALVDYVNQGNSAFDCPGHQGGEFFRRHPAGNQFVEYFGETLFRSDLCNADVAMGDLLIHEGAPCIAQQHAAKVFNADKTYFVLNGTSSSNKVVLNALLTPGDLVLFDRNNHKSNHHGALLQAGATPVYLETARNPYGFIGGIDAHCFEEDYLRELISEVAPQRAREARPFRLAVIQLGTYDGTIYNARQVVDKIGHLCDYILFDSAWVGYEQFIPMMADCSPLLLELNENDPGILVTQSVHKQQAGFSQTSQIHKKDSHIKGQSRYVPHKRMNNAFMMHASTSPFYPLFAALDVNAKMHEGVSGRNMWMDCVVNGIDARKLILENCHHIRPFVPELIDGKPWQSYPTSEIASDLRFFHFVPGEHWHAFEGYAEHQYFVDPCKLLLTTPGINAASGEYEDFGVPATILANFLRENGVVPEKCDLNSILFLLTPAEDMAKLQQLVALLARFEKLLEADAPLAEVLPSIYKQHEARYAGYTLRQLCQEMHDLYARHNVKQLQKEMFRKSHFPKVSMNPQEANYAYLRGEVELVRLPEAEGRIAAEGALPYPPGVLCVVPGEIWGGSVLRYFSALEEGINLLPGFAPELQGVYIEEHDGRKQVWCYVIKPRDAQRSLLKEEKL

SEQ ID NO: 157347 - DNA, 2136 bp, Salmonella typhimurium LT2
  CDS (1)..(2136): transl_table=11
atgaaatcaatgaatattgccgccagcggtgaactcattccccgtctctccacccaccgaaacgtagtggcgctggacagtaccgactttaccgatgtggccgcagtcgtcattaccactgccgacagccgtagcggtattctggcgttgcttaaacgcaccggttttcacctgccggtgtttatgcttgcggatgaacccgtcagcgcgcctgtcggcgttacggcggtaatagtcgggaacgcgcaggaatggctggagctggaaaacgctgcctgtcgctacgaagcggaacttctgccgcccttttatggcaccctgacccagtatgtcgacatggggaatagtacttttgcttgcccggggcaccagcatggcgaattttttagaaaacatcccgcaggccgccatttttatgacttttttggtgaaaacctgtttcgtgcggatatgtgtaacgccgatgtgaaacttggcgatctgctaatacatgaaggttctgccaaacacgcgcagaaatttgcggcaaaagtgtttaatgcggataaaacctactttgtgctgaatgggacttcggcggcgaataaagtggtcaccaacgccctgctgacgcgcggcgatctggtgctgtttgatcgtaataatcacaaatccaaccaccacggcgccctgattcaggccggggcgacgccagtctatcttgaagcggcgcgtaacccgtttggttttatcggtggcattgatgcgcactgttttgatgaaacgtacctgcgcgaccagattcgtgacgtgatgccggaaagcgccgatgcgtcgcgtccgttccgcctggcgatcattcagctgggtacctatgacggcactatttacaacgcccgtcaggtggtggataaaatcgggcatctctgcgattacattctgtttgactccgcgtgggtaggctatgagcagtttatcaatatgatggcggatacctcgccgttgcggctggagcttaatgaaaacgaccctgggatctttgtgacccaatcggtacataagcaacaggcggggttctcacaaacctcgcagatccacaaaaaagataaccatattcgcggccaggcgcgtttttgcccgcacaaacgcctgaacaacgccttcatgttgcatgcttcaaccagtccgttctacccgctgtttgcggcgctggatgtcaatgccaaaatccacgaaggggagagcggtcgccgcctgtgggcggagtgcgttgcgctgggcattgacgcgcgtaaagccattctcgcccgttgcaaactgcttcagccctttatcccactggtggttgacggcaagccgtggcaggcatatccgacggagaccattgccagcaatcgtcgtttcttcagttttgaacccggggcgaaatggcatggctttgagggctatgcggatgaccagtattttgtcgacccctgtaaactgttactgaccacgccaggtattgatgccgatagtgggcgatacaccgaattcggcatcccggcgaccattctcgcccactatctgcgtgagaacggtattgtgcctgagaagtgcgatctcaactcgattctgttcttgctgacacccgccgagagcgaagagaagctggcgcgactggtcgcgatgctggcgcaatttgaacggcacattgaagacgatacgccgcttgcggatgtattgccgacggtttttcagaaatacccggtgcgctaccgcgattacaccctgcgtgagctatgtcaggagatgcacaacctgtacgttagctttgacgttaaggatctgcaaaaagcgatgttccgcaaagaaagcctgccgcatgtggcgatgaacccacaggatgccaacagcgcctttattcgcggcgatgtagagctggtgcgtatcagcgaggcgggcgggcgtattgctgccgagggggcattgccatacccgccgggcgtactgtgcgtggtgccgggggagatttggggcggcgcggcgcagcgttattttttggcgctggaagagggcatcaatctgttgcctggtttttcgccggaattgcagggggtatatagcgagaccgatgccgatggaattcaacgcttgtacggatatgttttaaagtaa

SEQ ID NO: 157348 - protein, 711 aa, Salmonella typhimurium LT2
MKSMNIAASGELIPRLSTHRNVVALDSTDFTDVAAVVITTADSRSGILALLKRTGFHLPVFMLADEPVSAPVGVTAVIVGNAQEWLELENAACRYEAELLPPFYGTLTQYVDMGNSTFACPGHQHGEFFRKHPAGRHFYDFFGENLFRADMCNADVKLGDLLIHEGSAKHAQKFAAKVFNADKTYFVLNGTSAANKVVTNALLTRGDLVLFDRNNHKSNHHGALIQAGATPVYLEAARNPFGFIGGIDAHCFDETYLRDQIRDVMPESADASRPFRLAIIQLGTYDGTIYNARQVVDKIGHLCDYILFDSAWVGYEQFINMMADTSPLRLELNENDPGIFVTQSVHKQQAGFSQTSQIHKKDNHIRGQARFCPHKRLNNAFMLHASTSPFYPLFAALDVNAKIHEGESGRRLWAECVALGIDARKAILARCKLLQPFIPLVVDGKPWQAYPTETIASNRRFFSFEPGAKWHGFEGYADDQYFVDPCKLLLTTPGIDADSGRYTEFGIPATILAHYLRENGIVPEKCDLNSILFLLTPAESEEKLARLVAMLAQFERHIEDDTPLADVLPTVFQKYPVRYRDYTLRELCQEMHNLYVSFDVKDLQKAMFRKESLPHVAMNPQDANSAFIRGDVELVRISEAGGRIAAEGALPYPPGVLCVVPGEIWGGAAQRYFLALEEGINLLPGFSPELQGVYSETDADGIQRLYGYVLK

SEQ ID NO: 157349 - DNA, 2163 bp, Yersinia pestis KIM
  CDS (1)..(2163): transl_table=11
atgacactattaaaaatagcaacaagcgcccgcctggcttcttatgtagaaactcagcgcggagtggtgtacctcaatcagactgactttactgatgttgccgcggtggtaatgtcggttgaagatgcaaatgcgggtatattgtcaatgctgcatgaccttggttttgctattcctgcgtttattgccgtgacggcagaacagacggtctctgctgattatttgcccttgattaaaggtgtcattacgcttggtgaagcaaataaagctttttataacgctcaggtagaagctgccgccagtgaatatcaaaagaatctcttaccgccttttttctcaacactgaaaaaatatgtcgagatgaataactcgacctttgcttgccctggccatcaggggggcgaattttttcgcaagcatcctgcaggacgccagttttttgaattctacggtgagacgatttttcgttcagatatgtgtaatgccgatgtcaaattaggtgatttacttatccatgaaggggcggcaaaagatgcacagaaatatgctgctaaggtattcaatgccgataaaacctattttgtcctgaacggtacctcggcggccaacaaggtcgtgaccaacgctttactgacccgtggtgatttagtgttgtttgaccgcaataaccataaatctaaccatcatggtgcgctgatccaggcgggcgcgacgccggtttatctggaaacggcccgtaacccctttggttttattggtggtattgatgcgcactgcttcaatgaagattatttacgtcaacaactgcgtgaagttgctcccgagcgtgcagaagaggctcggccattccgattagcgatcattcaattgggtacctacgacggtacggtatataacgcccgccaagtagttgatagtattggtcatttatgcgattacattttgtttgattctgcttgggtgggttacgaacaatttattccgatgatgaaggatttctcaccgttattactggaattaaatgaaaatgaccctgggattattgtgactcaatcggtacacaagcagcaggccggtttttctcagacctctcaggtacataaaaaagataatcacattaaaggacagaaacgtcactgtaaccataagcgttttaataatgcctttatgttgcatgcatcgaccagtccgttttatccattatttgcggcattggatgttaatgccaaaatacactctggtgacagtggccgccgtatgtggatggattgtgtaaaactcggtattgaaacccgtaaatcgttattggcacgctgttcgatgttacggccttttattcctccagttgttggcggtaaaaattggcaagattatgctactgatgtgattgccaatgatgcgcgcttctttaattttgtcccagatgaacgctggcatggatttgagggatataaccaagatcagtatttggttgatccgtgcaaattattgctgacgacgccgggaattgatgccagtactggccgatatacttcgtttggtattccggcggctattttggcgactttcctgcgtgaaaatggaattgtgccagaaaaatgtgatcttaactcgatcctattcctgctgaccccggcagaaaataccgccaaaatggcacacctggtggatatgttggtgcagtttgaacgctatgttgaacaagatgcgaagctgtgtgatgtattaccgacgatctatcgtaagaatgaagagcgttatcacggttataccttgcgtcagttatgccaagaaatgcatgacctgtacgtcagccatgacgttaagcaattgcaaaaggatatgttccgtaaagccagtttcccgcaggtagtcatgaacccgcaagacgccaatattcagtttatccgcgataatattgagttgattcctattgctgaagctgaaggccgtattgccgccgaaggcgctttgccttatccaccgggtgtgctgtgtgtggtgcccggtgaagtgtggggtggggcggttcagcgttattttctggcgctggaagaggggattaacttactgccgggcttttcacctgagttacagggcgtttatatcgaaaaaggtgatgtgtcttggcggcgtatctttggttatgtgattacgcaatag

SEQ ID NO: 157350 - protein, 720 aa, Yersinia pestis KIM
MTLLKIATSARLASYVETQRGVVYLNQTDFTDVAAVVMSVEDANAGILSMLHDLGFAIPAFIAVTAEQTVSADYLPLIKGVITLGEANKAFYNAQVEAAASEYQKNLLPPFFSTLKKYVEMNNSTFACPGHQGGEFFRKHPAGRQFFEFYGETIFRSDMCNADVKLGDLLIHEGAAKDAQKYAAKVFNADKTYFVLNGTSAANKVVTNALLTRGDLVLFDRNNHKSNHHGALIQAGATPVYLETARNPFGFIGGIDAHCFNEDYLRQQLREVAPERAEEARPFRLAIIQLGTYDGTVYNARQVVDSIGHLCDYILFDSAWVGYEQFIPMMKDFSPLLLELNENDPGIIVTQSVHKQQAGFSQTSQVHKKDNHIKGQKRHCNHKRFNNAFMLHASTSPFYPLFAALDVNAKIHSGDSGRRMWMDCVKLGIETRKSLLARCSMLRPFIPPVVGGKNWQDYATDVIANDARFFNFVPDERWHGFEGYNQDQYLVDPCKLLLTTPGIDASTGRYTSFGIPAAILATFLRENGIVPEKCDLNSILFLLTPAENTAKMAHLVDMLVQFERYVEQDAKLCDVLPTIYRKNEERYHGYTLRQLCQEMHDLYVSHDVKQLQKDMFRKASFPQVVMNPQDANIQFIRDNIELIPIAEAEGRIAAEGALPYPPGVLCVVPGEVWGGAVQRYFLALEEGINLLPGFSPELQGVYIEKGDVSWRRIFGYVITQ

SEQ ID NO: 157351 - DNA, 2196 bp, Shigella flexneri 2a str. 301
  CDS (1)..(2196): transl_table=11
atggggcagggttttccaccttgtccggtattcttacttccccgaaacgggtttgcgcttatgaaatcaatgaatattgccgccagtagtgaactggtatcccgactttcttctcatcgccgcgtggtggcgttgggagatactgattttacggacgtcgcggcagtcgtcattaccgctgcggatagtcgcagtggcattcttgcgttgcttaagcgcaccggttttcatctaccggtgtttttgtattccgaacatgctgttgaattacctgcgggcgttacggcggtaatcaacggcaacgagcagcagtggctggagctggaatccgcagcctgtcagtatgaagagaatttgctgccaccgttttatgacacgctgacgcagtacgttgagatgggcaacagcacctttgcttgccctggacatcaacatggtgcgttctttaaaaagcatcctgccggacgccatttttacgatttctttggtgagaacgtctttcgcgccgatatgtgtaacgctgacgtaaaattgggcgatctgcttattcatgaaggatcggcgaaagatgcgcagaaattcgcagccaaagtctttcatgccgataaaacctattttgtgctgaacggcacatcggcagcgaataaagtggtgacgaatgcgctgttaacgcgtggcgatctggtgctcttcgaccgtaacaaccataagtcgaatcatcacggcgcgctgattcaggcggggacgacgccggtctatctggaagcttcacgtaacccgtttggtttcattggcggtattgatgcgcactgttttaatgaagagtatctgcgccagcaaattcgcgacgttgcgccagaaaaagccgacctgccgcgcccgtttcgcctgacgattattcagctgggaacctatgacggcactgtctataacgcccgtcaggtgatcgataccattgggcatctgtgtgattacattctgtttgattccgcgtgggtcggttacgaacagtttatctcgatgatggcggatagctcgccgctgctgttagaacttaacgaaaacgatccggggatttttgtgacccagttggtgcacaaacagcaggctggattctcacagacgtcgcagatccataaaaaagataaccatatccgcggacaggcgcgtttttgcccgcataagcggttgaataacgcctttatgctccatgcttctaccagccctttctatccgctgtttgctgcactggatgttaacgccaaaattcatgaaggggagagtgggcgtcggctgtgggctgagtgcgttgagttgggtattgagtcgcgcaaggctattcttgcgcgctgtaagctgttccgcccgtttatcccgcccgttgttgatggcaaattgtggcaggattatccgacatcagtgttagccagcgaccgccgttttttcagttttgagccgggggcgaagtggcacggctttgaaggatatgccgcggatcagtattttgttgatccgtgcaagctgttactcactacaccaggtatcaatgccgaaaccggcgaatatagcgactttggcgttccggcgacgattctggcgcactatctgcgtgagaacggcattgtgccggagaagtgcgatctcaactccattctgttcttattaactccggcggaaagccacgagaagctggcacaactggtggcgatgctggcgcaatttgaacagcatattgaggatgactcgtcgctggctgaggtgttgccgagcgtttataacaaatatccggtgcgctatcgcgactacaccctgcgccagttgtgtcaggagatgcacgatctgtatgtcagtttcgacgtcaaagacctacaaaaagcgatgttccgccagcagagtttcccgtcagtggtgatgaacccccaggatgcgcatagcgcttatattcgcggtgaagtggagttggtgcggattcgtgatgccgaagggcgaattgcggcagaaggggcgttgccttatccacctggcgtgctttgcgtggtacccggggaagtctggggtggggcggttcaacgttatttccttgcgctggaagaaggcgtgaatttgttgccgggattttcgccggagttgcaaggtgtctatagcgaaaccgatgcggatggcatgaaacgattgtacggttatgtgttgaagtaa

SEQ ID NO: 157352 - protein, 731 aa, Shigella flexneri 2a str. 301
MGQGFPPCPVFLLPRNGFALMKSMNIAASSELVSRLSSHRRVVALGDTDFTDVAAVVITAADSRSGILALLKRTGFHLPVFLYSEHAVELPAGVTAVINGNEQQWLELESAACQYEENLLPPFYDTLTQYVEMGNSTFACPGHQHGAFFKKHPAGRHFYDFFGENVFRADMCNADVKLGDLLIHEGSAKDAQKFAAKVFHADKTYFVLNGTSAANKVVTNALLTRGDLVLFDRNNHKSNHHGALIQAGTTPVYLEASRNPFGFIGGIDAHCFNEEYLRQQIRDVAPEKADLPRPFRLTIIQLGTYDGTVYNARQVIDTIGHLCDYILFDSAWVGYEQFISMMADSSPLLLELNENDPGIFVTQLVHKQQAGFSQTSQIHKKDNHIRGQARFCPHKRLNNAFMLHASTSPFYPLFAALDVNAKIHEGESGRRLWAECVELGIESRKAILARCKLFRPFIPPVVDGKLWQDYPTSVLASDRRFFSFEPGAKWHGFEGYAADQYFVDPCKLLLTTPGINAETGEYSDFGVPATILAHYLRENGIVPEKCDLNSILFLLTPAESHEKLAQLVAMLAQFEQHIEDDSSLAEVLPSVYNKYPVRYRDYTLRQLCQEMHDLYVSFDVKDLQKAMFRQQSFPSVVMNPQDAHSAYIRGEVELVRIRDAEGRIAAEGALPYPPGVLCVVPGEVWGGAVQRYFLALEEGVNLLPGFSPELQGVYSETDADGMKRLYGYVLK

SEQ ID NO: 157353 - DNA, 2163 bp, Shewanella oneidensis MR-1
  CDS (1)..(2163): transl_table=11
atgaaatcattaaaagttgccgcaagcttatctgttagatcttgttttgatatagacagagaagttgtcaatgtattaaccactgatttttgcgatgtgggtgcggctgtagtctctgttgatgatgttaaagatggtattgttgaaaaaattaaaaataccggattaaaactgcctattttcgtatcagtttgctgcgaagaaaccttcccagatgatatttgttcctcgattaccggggtatttgaactctgcggtagcaataccgatttctatggtaagcaggtcgaaaccgctatcaagaaatatgagcaagctctattaccgcccttctttggcactctgaaaaaatacgtcgaaatgggtaactccacctttgcctgcccaggccatcagggcggacaattctttcgtaaacatcccgtaggtcgccaatttttcgatttctttggcgaaaccattttccgctccgacatgtgtaatgctgacgtaaaactcggtgatctgttaatccacgaaggtgcaccactggatgcacaaaaatatgcggcaaaagtctttaacgccgataaaacctactttgtgcttaacggcacttcctcctcgaataaagtcgccaccaatgcgctgcttgctaaaggtgatttagtattattcgaccgtaataaccacaaatccaaccaccatggtgcgttaattcaagccggcgcaacaccgatttacttagaaaccgcccgtaaccccttcggctttattggcggtatcgacgcccactgcttcaaagaagcttatttaagggaacaaattcgcgaagttgcaccagaacgtgccgatgaaaaacgcccgttccgtttagcgattatccaactcggcacctacgacggcaccatctacaatgctcgccaagtggttgatcgtattggtcatctatgtgattacatcctgtttgactcggcttgggttggctatgaacagtttattcctatgatgaatgactgctcgccactgctgctggaactgacgcctgaagatcccggtattatcgtgactcaatcagtacataaacagcaggcaggtttctcacaaacgtcgcaaatccataaaaaagataaacatatcaaaggccaagcgagatattgcaaccataaacgtttcaacaatgcctttatgatgcacgcctccaccagccacttctatccactgtttgccgcattagatgtgaacgctaagatgcacgaaggtgccagcggccgttatctgtggcgtgaagccgtcaaagccgggattgaagcccgtaagttactgcttaaaaaatgtaagtatatcaagccatttatccccagcatgatcgatggccgccaatggcaggattacccaaccgagcaaatggccgatgatttgcgcttctttgaatttgaaccaggacaaaaatggcactcattcgagggctatgaaaaaggccaatatttcgttgacccttgtaagttcctattaaccacaccaggtattgatgccgaaaccggtaaatatactgagtttggtattccagcgactattttggctaacttcttacgtgaaaataatattattcccgagaagtgcgacttaaattcgatattattcctaatgacacctgcggaagatatggcaaaaatgcagcacttagtgtcgcaaatatcccgcttcgagaaattagtcgatgaagatgcgccattatcggaagtattgccaaacgtctataacgccaataaagcccgttataaagactacaccattcgccaactctgccaagaaatgcacaacctttatgtcagccatgacgtaaaacaactgcaaaaagaaatgttccgccatgctcacttcccaaccaaggtgatggacccgcaggaagccaatcttgaatttattcgtggcaatgtcgaattagtgccactgtcgcaaatcgaaggtcgaattgccgcagaaggcgccctgccatatccaccaggggtgttatgtatggtgccaggtgaaatatggggtggcgcagtacaacgttatttcttagctctcgaagaaggcatcaacttattacccggattctcccctgaattacaaggtgtttatctcgaaagcacccctgacggaaaaatccaagccttaggttatgtgttaaataaataa

SEQ ID NO: 157354 - protein, 720 aa, Shewanella oneidensis MR-1
MKSLKVAASLSVRSCFDIDREVVNVLTTDFCDVGAAVVSVDDVKDGIVEKIKNTGLKLPIFVSVCCEETFPDDICSSITGVFELCGSNTDFYGKQVETAIKKYEQALLPPFFGTLKKYVEMGNSTFACPGHQGGQFFRKHPVGRQFFDFFGETIFRSDMCNADVKLGDLLIHEGAPLDAQKYAAKVFNADKTYFVLNGTSSSNKVATNALLAKGDLVLFDRNNHKSNHHGALIQAGATPIYLETARNPFGFIGGIDAHCFKEAYLREQIREVAPERADEKRPFRLAIIQLGTYDGTIYNARQVVDRIGHLCDYILFDSAWVGYEQFIPMMNDCSPLLLELTPEDPGIIVTQSVHKQQAGFSQTSQIHKKDKHIKGQARYCNHKRFNNAFMMHASTSHFYPLFAALDVNAKMHEGASGRYLWREAVKAGIEARKLLLKKCKYIKPFIPSMIDGRQWQDYPTEQMADDLRFFEFEPGQKWHSFEGYEKGQYFVDPCKFLLTTPGIDAETGKYTEFGIPATILANFLRENNIIPEKCDLNSILFLMTPAEDMAKMQHLVSQISRFEKLVDEDAPLSEVLPNVYNANKARYKDYTIRQLCQEMHNLYVSHDVKQLQKEMFRHAHFPTKVMDPQEANLEFIRGNVELVPLSQIEGRIAAEGALPYPPGVLCMVPGEIWGGAVQRYFLALEEGINLLPGFSPELQGVYLESTPDGKIQALGYVLNK

SEQ ID NO: 157355 - DNA, 2208 bp, Escherichia coli CFT073
  CDS (1)..(2208): transl_table=11
atgaacaaaatgtcagaattaaaaattgccgttagccgttcttgcccggattgcttttccactcatcgtgaatgcgtgaatattgacaaaagtaattatattgacgttgccgctattattttatcagtcaatgatgttgaacgtggaaaactcgatgaaatagacgctactggctatggcattcctgtttttattgcaacggaaaatgaagaacgtgtaccagcagaatatctgccacgtatttctggtgtcttcgagcattgcgaatcacggaaagagttttatggacgtcagttagaaaccgctgccagccattatgaaacgcaactgcgcccgcccttcttccgcgcactggtcgattatgtcaatcagggcaatagcgcttttgactgcccgggtcatcagggaggtgagtttttccgtcgccatccggcaggcaatcagttcgtggaatattttggcgaaatgctcttccgctccgacttgtgtaatgccgacgttgcaatgggtgatcttctgattcatgaaggtgcgccatgcattgcacagcaacatgcggctaaagtgtttaatgccgataaaacgtactttgttttaaacggcacctcctcctccaacaaagtggttttaaacgccctgctgacaccgggtgatctggtgctgtttgaccgcaataaccataagtctaaccatcacggggccttgctacaggctggtgcaacaccggtttatctggaaacagcacgtaacccgtatggttttatcggtggcattgatgcgcactgcttcgaagaaagttatctgcgtgaactgattacagaagttgcaccgcaacgggcaaaagaagcgcgtccgttccgcctcgctgtgattcagttaggcacctacgacggtactatttataacgcccgccaggtggtggataaaatcggtcatctgtgtgactacatcctgtttgactcagcatgggtcggctatgaacagtttattccgatgatggcggactgttcgccgctgctgctggagcttaatgagaacgatccgggtattctggttacgcaatctgtgcataaacaacaggctggtttttctcagacttcacaaattcataaaaaagacagccatatcaaagggcaacagcgttatgtaccgcacaaacgcatgaacaacgcctttatgatgcacgcctccaccagcccgttctatccgctgtttgccgcactggatatcaacgccaaaatgcatgaaggtgtcagcggtcgtaatatgtggatggattgtgtggttaacggtattaatgcccgcaaattgatcctcgataactgccagcacattcgcccgttcgttcctgaactggtggatggtaaaccctggcagtcgtatgaaacagcgcaaattgcggttgatctgcgcttctttaaatttgtacccggtgagcactggcattcttttgaaggctacgcagagaaccaatactttgtcgatccgtgcaaactgttgctgacaactccaggtattgatgcacgtaacggcgaatatgaagcgttcggtgtacctgcaacgattcttgctaacttcctgcgcgaaaatggcgtagtgccggaaaaatgcgatcttaactccatcctcttcctgctgactccggcagaagatatggccaaactgcagcaacttgttgccctgctggtacgcttcgaaaaactactggaagctgatgcgcctctggcggaagtactgccttccatctacaaacagcatgaagagcgctacgccggttataccctgcgtcagttgtgccaggaaatgcatgatttgtatgcccgtcacaacgtgaaacaactgcaaaaagagatgttccgtaaggaacacttccctcgcgtcagcatgaatccgcaagaagccaactacgcctacttacgcggtgaagtggagctggttcgtctgccggatgcagaaggccgtatcgctgccgaaggtgcgcttccttatcctccgggtgtgctgtgtgttgttcctggtgaaatctggggtggtgctgttttgcgttacttcagcgctctggaagaaggcatcaacctgctgccaggttttgcaccggagctgcagggtgtctatatcgaagaacatgatggtcgtaagcaagtttggtgctatgtcatcaagcctcgtgatgcgcaaagcaccctgttgaaaggggaaaaattatga

SEQ ID NO: 157356 - protein, 735 aa, Escherichia coli CFT073
MNKMSELKIAVSRSCPDCFSTHRECVNIDKSNYIDVAAIILSVNDVERGKLDEIDATGYGIPVFIATENEERVPAEYLPRISGVFEHCESRKEFYGRQLETAASHYETQLRPPFFRALVDYVNQGNSAFDCPGHQGGEFFRRHPAGNQFVEYFGEMLFRSDLCNADVAMGDLLIHEGAPCIAQQHAAKVFNADKTYFVLNGTSSSNKVVLNALLTPGDLVLFDRNNHKSNHHGALLQAGATPVYLETARNPYGFIGGIDAHCFEESYLRELITEVAPQRAKEARPFRLAVIQLGTYDGTIYNARQVVDKIGHLCDYILFDSAWVGYEQFIPMMADCSPLLLELNENDPGILVTQSVHKQQAGFSQTSQIHKKDSHIKGQQRYVPHKRMNNAFMMHASTSPFYPLFAALDINAKMHEGVSGRNMWMDCVVNGINARKLILDNCQHIRPFVPELVDGKPWQSYETAQIAVDLRFFKFVPGEHWHSFEGYAENQYFVDPCKLLLTTPGIDARNGEYEAFGVPATILANFLRENGVVPEKCDLNSILFLLTPAEDMAKLQQLVALLVRFEKLLEADAPLAEVLPSIYKQHEERYAGYTLRQLCQEMHDLYARHNVKQLQKEMFRKEHFPRVSMNPQEANYAYLRGEVELVRLPDAEGRIAAEGALPYPPGVLCVVPGEIWGGAVLRYFSALEEGINLLPGFAPELQGVYIEEHDGRKQVWCYVIKPRDAQSTLLKGEKL

SEQ ID NO: 157357 - DNA, 2136 bp, Escherichia coli CFT073
  CDS (1)..(2136): transl_table=11
atgaaatcaatgaatattgccgccagtagtgaactggtatcccgactttctactcatcgccgcgtggtggcgttgggagatactgattttacggacgtcgcggcagtcgtcattaccgctgcggatagtcgcagtggcattcttgcattgcttaagcgcaccggttttcatctaccggtgtttttgtattccgaacatgctgttgaattacctgcgggcgttacggcggtaatcaacggcaacgagcagcagtggctggagctggaatccgcagcctgtcagtatgaagagaatttgctgccaccgttttatgacacgctgacgcagtacgttgagatgggtaatagcacctttgcttgccctggacatcaacatggtgcgttctttaaaaagcatcctgccggacgccatttttacgatttctttggcgagaacatctttcgcgccgatatgtgtaacgctgacgtaaaattgggcgatctgcttattcatgaaggatcggcgaaagatgcgcagaaatttgcagccaaagtctttcatgccgataaaacctattttgtgctgaacggcacatcggcagcgaataaagtggtgacgaatgcgctgttaacgcgtggcgatctggtgctcttcgaccgtaacaaccataagtcgaatcatcatggcgcgttgattcaggcgggggcgacaccggtctatctggaagcttcacgtaacccgtttggtttcattggcggtattgatgcgcactgttttaatgaagagtatctgcgccagcaaattcgcgacgttgcgccagaaaaagccgacctgccgcgcccgtttcgcctggcgattattcagctgggaacctatgacggcactgtctataacgcccgtcaggtgatcgataccgttgggcatctgtgtgattacattctgtttgattccgcgtgggtcggttacgaacagtttatcccgatgatggcggatagctcgccgctgctgttagaacttaacgaaaacgatccggggatctttgtgactcagtcggtgcacaaacagcaggcgggattctcacagacgtcgcagatccataaaaaagataaccatatccgtggacaggcgcgtttttgcccgcataagcggttgaataatgcctttatgctccatgcttctaccagcccgttctatccgctgttcgccgccctggacgttaacgccaaaattcatgaaggggagagtgggcgtcggctgtgggctgagtgcgttgagttgggtattgagtcgcgcaaggctattcttgcgcgctgtaagctgttccgcccgtttatcccgcccgttgttgatggcaaattgtggcaggattatccgacgtcagtgttagccagcgaccgccgttttttcagttttgagccgggggcgaattggcacggctttgaaggatatgccgcggatcagtattttgttgatccgtgcaagctgttactcaccacgccgggtatcgatgccgaaaccggcgaatatagcgactttggcgttccggcgacgattctggcgcactacctgcgtgagaacggcattgtgccggagaagtgcgatctcaactccattctgttcttattaactccggcggaaagccacgagaagctggcacaactggtggcgatgctggcgcagtttgaacagcatattgaggatgattcgccgctggctgaggtgttgccgagcgtttataacaaatatccggtgcgctatcgcgactacaccctgcgccagttgtgtcaggagatgcacgatttgtatgtcagtttcgacgtcaaagacctacaaaaagcgatgttccgccagcagagtttcccgtcagtggtgatgaatccccaggatgcgcatagcgcttatattcgcggtgaagtggagttggtgcggattcgtgatgccgaagggcgaattgcggcagaaggggcgttgccttatccacctggcgtgctttgcgtggtacccggggaagtctggggtggggcggttcaacgttatttccttgcgctggaagaaggcgtgaatttgttgccgggattttcgccggagttgcaaggtgtctatagcgaaaccgatgcggatggcatgaaacggttgtacggttatgtgttgaagtaa

SEQ ID NO: 157358 - protein, 711 aa, Escherichia coli CFT073
MKSMNIAASSELVSRLSTHRRVVALGDTDFTDVAAVVITAADSRSGILALLKRTGFHLPVFLYSEHAVELPAGVTAVINGNEQQWLELESAACQYEENLLPPFYDTLTQYVEMGNSTFACPGHQHGAFFKKHPAGRHFYDFFGENIFRADMCNADVKLGDLLIHEGSAKDAQKFAAKVFHADKTYFVLNGTSAANKVVTNALLTRGDLVLFDRNNHKSNHHGALIQAGATPVYLEASRNPFGFIGGIDAHCFNEEYLRQQIRDVAPEKADLPRPFRLAIIQLGTYDGTVYNARQVIDTVGHLCDYILFDSAWVGYEQFIPMMADSSPLLLELNENDPGIFVTQSVHKQQAGFSQTSQIHKKDNHIRGQARFCPHKRLNNAFMLHASTSPFYPLFAALDVNAKIHEGESGRRLWAECVELGIESRKAILARCKLFRPFIPPVVDGKLWQDYPTSVLASDRRFFSFEPGANWHGFEGYAADQYFVDPCKLLLTTPGIDAETGEYSDFGVPATILAHYLRENGIVPEKCDLNSILFLLTPAESHEKLAQLVAMLAQFEQHIEDDSPLAEVLPSVYNKYPVRYRDYTLRQLCQEMHDLYVSFDVKDLQKAMFRQQSFPSVVMNPQDAHSAYIRGEVELVRIRDAEGRIAAEGALPYPPGVLCVVPGEVWGGAVQRYFLALEEGVNLLPGFSPELQGVYSETDADGMKRLYGYVLK

SEQ ID NO: 157359 - DNA, 2181 bp, Vibrio vulnificus CMCP6
  CDS (1)..(2181): transl_table=11
atgaagcgtttagttattggtgttagtaattacatgccagaagatttcagtttattagctgaatctttagatgaacaatttaatcgtcatcttcatcctttagagcaagtcgaattaaccgatgttggtgctgccattattacgtcggcagatattaaggctggtctacacaaagtgatttctgaaacgggttatggcattccggttttcttggtcacagatgaaaacccagtgtcagccgaagattacgtatggttaaccggcgttatcgatttagaaagacaatccatcgaatactactgtcgccaaatcaatgaagcggtaaccaaatacgaatgccgcctattgccgcctttcttcaaacaactgacgcactacgtggaaatgggcaactctgcattcgactgtccaggacaccaaggcggtcagttcttcaaaaaacacccagcaggtaaacagttctacgatttcttcggtgaaaacctattccgtagtgacttgtgtaacgcggacgtagatttaggtgacttgttaatccacgaaggctctgcccaccaagctcaagcgcacgcagcaaaagtgttcaactcagacaaaacttacttcgtactcaacggcacttcggcttcaaacaaagtggtgtgtaacgcgttagtgaccgagggggacttggtgatgtttgaccgtaacaaccacaaatcaaaccaccacggcgcattaatccaagcgggcggtatgccagtttacctagaaacggcgcgtaacccttggggctttattggtggtatggatgagcactgttttgatgaagaatacatccgtgcccaaatcgccaaagtatcacccgaacgtgcgcgtgatgaacgtccattccgtcttgcgatcatccaattgggcacttacgacggtaccatctacaacgcacgctacgtgatggataagattggtcatctgtgtgactacatcctatttgactcagcatgggtgggttacgagcagttcattccgatgatgaaagactgttctccattgctactggatctgaaaccagaagatgcgggtgtgatcgtgactcagtctgttcacaagcaacaagctggcttttctcaaacctcgcaaatccacaaaaaagaccaccacatcaaaggtcaggctcgctactgcaaccacaaacgcttcaacaacgcgtttatgatgcacgcgtcaacttcaccattctatgcgctgttctccgcattggatgtgaacgccaagatccacgatggtgaagcgggtctgcgtctatggcgtgatgcggttaagacaggtatcgaagcgcgtaaagaaatccttaagagttgtgaattgattcgtccgttcattccagaccaagtcgaaggtcaaccttggggcagctacgacactgacgtgatcgcaacgaataagaaattcttcatgtttgagccaaacgcaagctggcacaaatttgaaggttacggtgaaggtcaatacttcgttgacccatgtaaattgttgctaactactgcgggtattgcagaagacggcagctacgcagactttggtattcctgccacgctattggcgaacttcctacgtgagaacggcatcatccctgagaagtgtgacttgaactctatcttgttccttctcactccagcagaggacatgggtaagatccgtcatcttgtggcgcaaattaaccgcttcgaaaaattcattcgtgatgatgcgccgctaaacatcgtgctgcctcgcgtttacgaagcgaataaagagcgctaccgcggctacaccatccgtcagctatgtcaggaaatgcatgacatgtacaaagagctgaacgtgaaacagctacaaaaagcgatgttccgtagcgaatacttcccaactatggtgcacaaaccagatgtggcgacacgcaaatacttccgtggcgagtgtgattacttgcctctgaaagaagcggtaggtcgtgtcgcagcagaaggtgcgcttccttaccctccaggcattatctgtgtgatcacaggcgaaatctggactcaacaagtggtcgattacttcttatctctagaagaaggcatcaaccgattcccaggcttcgcacccgagattcaaggtgtgtacctagaagacgtcaatggccgcaccaccgcccattgctacgcccttaaagattaa

SEQ ID NO: 157360 - protein, 726 aa, Vibrio vulnificus CMCP6
MKRLVIGVSNYMPEDFSLLAESLDEQFNRHLHPLEQVELTDVGAAIITSADIKAGLHKVISETGYGIPVFLVTDENPVSAEDYVWLTGVIDLERQSIEYYCRQINEAVTKYECRLLPPFFKQLTHYVEMGNSAFDCPGHQGGQFFKKHPAGKQFYDFFGENLFRSDLCNADVDLGDLLIHEGSAHQAQAHAAKVFNSDKTYFVLNGTSASNKVVCNALVTEGDLVMFDRNNHKSNHHGALIQAGGMPVYLETARNPWGFIGGMDEHCFDEEYIRAQIAKVSPERARDERPFRLAIIQLGTYDGTIYNARYVMDKIGHLCDYILFDSAWVGYEQFIPMMKDCSPLLLDLKPEDAGVIVTQSVHKQQAGFSQTSQIHKKDHHIKGQARYCNHKRFNNAFMMHASTSPFYALFSALDVNAKIHDGEAGLRLWRDAVKTGIEARKEILKSCELIRPFIPDQVEGQPWGSYDTDVIATNKKFFMFEPNASWHKFEGYGEGQYFVDPCKLLLTTAGIAEDGSYADFGIPATLLANFLRENGIIPEKCDLNSILFLLTPAEDMGKIRHLVAQINRFEKFIRDDAPLNIVLPRVYEANKERYRGYTIRQLCQEMHDMYKELNVKQLQKAMFRSEYFPTMVHKPDVATRKYFRGECDYLPLKEAVGRVAAEGALPYPPGIICVITGEIWTQQVVDYFLSLEEGINRFPGFAPEIQGVYLEDVNGRTTAHCYALKD

SEQ ID NO: 157361 - DNA, 2517 bp, Bradyrhizobium japonicum USDA 110
  CDS (1)..(2517): transl_table=11
gtgatagtcggactcgcggaagctcctcctcacccgaattgctgcgcaatccgcctctccccgcaagcggggagaggcgaaacgccagccgcagctcctgtcatccaactgtcatcgaatgtgccgagagctgtgtctccagtacattcgggacagacaatggactatttcaagcgcttcaacttcctgttcgccgcacccgtgttcgacgccgacgacctcgaaggcgtccgcttcaaccagatcatcgaggaaatccagcgctccggcttcgaggtcgtccgggcccgcaagctggaggacgcggagatcgcggtgcagaccgacgccgcgatcggctgcatggtggtggactggggcaagaagggcctggagggcaagacctcggcgctgatcaatttgatgcggcgccgcggcctcgacttcccgatcatcctgctgatccggcgcaagcggttcgaggatctgccggtcgaggtgctcgacttcatcgacggctatgtcttcctctccgaggagacgccgaccttcatcgccaagaacctgatcagccggctcaagcaatatgccgagacgctgaagacgccgttcttcggcgcgctggtcgactatgccgaggaaggcaaccagctctggacctgtccgggccacaatggcggcgtgttctacaatcgcagcccgatcggccgggtgttcgtcgagcatctcggcgaatccgtgttccgcgacgacctcgacaattccgtgctcgacctcggcgacctccttacccatgagggcccggcgctgaaggcgcagaaggaggcagcggcgatcttcggcgcggagaagacctatttcgtgctcaacggcacctcgacctcgaacaaggtcgcgctcggcgcgctcgtcaccgacggcgatctcgtgctgttcgaccgcaacaaccacaaggccgctcatcacggcgcgctgatgatcaatggcggcatcccggtctacgtcccgaccattcgcaacgcctggggcctgatcggcccgatgcgctgggacgtgctcgacgagaaggcgctgcgcgaggcgatccgcaaccatccgctggttagggatcgcgacgcctggcgcaaggaacggccgttccgcgtcgccgtggtcgaacagtgcacctatgacggctcgatccacagcgccgagatgatcctgaagcgcatcggccatctctgcgaatacatcctgttcgacgaggcctgggccggcttcatgaaattccacccgctctatgccggccgcttcgccatgggcctcgcgaaccttcccccggaagcgcccggcatcatcgcgacgcagtcgacccacaagcaactcgcgagcttctcgcaggcctcgcaaatccacatcaaggaccgtcacatccgcggccagaagcggcgcgtcgagcatcgccgcttcaacgaaagcttcatgcagcacgcttccacgtcaccgttctatccgctgttcgcatccctcgacgtcggcgcgcagatgatgaaggggcgctccggcgaagtgctgtgggacgacacgatccggctcggcatcgagctgcgcaagaagatccgcgcaatgcggcgtgagttcgaggagaaggagcagaaccccgatcggcgctggttcttcgagcccttcgtcccggatcgcgtcgccatccccgacgtcagtcgccccggcgccgcccacaatgtcgcctgggagacgctgtccaccgacgagctcgccaccaatcccgccttgtggcaactctctccggataccaactggcacggctttcccgatctcgcggaaggctttgccatgaccgatccgaacaagctgacgctgctcacgcctggcttcgatcgcaccaccggcgcctatgccgagcacggcatccccgcccccgtcgtcgcgcaatatctgcgcgagaaccgcatcgtgcccgagaagaacgacctcaactccctgctcttcctgctcactcccggcgtcgaggcgagcaaggccggcacgctgatctccggcctcgtcgccttcaagaggctgcacgacgacaatgcgttgctggcggacgcaatcccggaattctaccagcggcggcaggcgcgctatgccggcgtgcggctgcgcgatctctgcggcgacatgcaccgtttcttccgcgccgccgatgtcagcgcgctccaggcgcggcagttcatgcccgagcacatgcctgagatcgcgatgtcgccccgcgatgccgcccgctatttgttccgcaacgacgtcgactatctgccgatcgaggcgatcgcgggccgcatcgccaccacgcccttcgtagtctatccgcccggcatcgccaccatcgtgcccggcgagcggctgacggaacgcgccaagcccatggtcgattatctcaagatgttcgagacctgcttcaacacgttcccgggcttcgacgtcgaaatccagggcgtctacaaggagatcgatgcccagggccgtatcgggctctatacttacgtcgttgccgagtag

SEQ ID NO: 157362 - protein, 838 aa, Bradyrhizobium japonicum USDA 110
MIVGLAEAPPHPNCCAIRLSPQAGRGETPAAAPVIQLSSNVPRAVSPVHSGQTMDYFKRFNFLFAAPVFDADDLEGVRFNQIIEEIQRSGFEVVRARKLEDAEIAVQTDAAIGCMVVDWGKKGLEGKTSALINLMRRRGLDFPIILLIRRKRFEDLPVEVLDFIDGYVFLSEETPTFIAKNLISRLKQYAETLKTPFFGALVDYAEEGNQLWTCPGHNGGVFYNRSPIGRVFVEHLGESVFRDDLDNSVLDLGDLLTHEGPALKAQKEAAAIFGAEKTYFVLNGTSTSNKVALGALVTDGDLVLFDRNNHKAAHHGALMINGGIPVYVPTIRNAWGLIGPMRWDVLDEKALREAIRNHPLVRDRDAWRKERPFRVAVVEQCTYDGSIHSAEMILKRIGHLCEYILFDEAWAGFMKFHPLYAGRFAMGLANLPPEAPGIIATQSTHKQLASFSQASQIHIKDRHIRGQKRRVEHRRFNESFMQHASTSPFYPLFASLDVGAQMMKGRSGEVLWDDTIRLGIELRKKIRAMRREFEEKEQNPDRRWFFEPFVPDRVAIPDVSRPGAAHNVAWETLSTDELATNPALWQLSPDTNWHGFPDLAEGFAMTDPNKLTLLTPGFDRTTGAYAEHGIPAPVVAQYLRENRIVPEKNDLNSLLFLLTPGVEASKAGTLISGLVAFKRLHDDNALLADAIPEFYQRRQARYAGVRLRDLCGDMHRFFRAADVSALQARQFMPEHMPEIAMSPRDAARYLFRNDVDYLPIEAIAGRIATTPFVVYPPGIATIVPGERLTERAKPMVDYLKMFETCFNTFPGFDVEIQGVYKEIDAQGRIGLYTYVVAE

SEQ ID NO: 157363 - DNA, 2181 bp, Vibrio parahaemolyticus RIMD 2210633
  CDS (1)..(2181): transl_table=11
atgaaacgtttaattataggtgttagtaattacatgccagaagacttcagtttattagctgaatctttagatgaacaatttaatcgtcatttacaacctttagagcaagttgaattaaccgacgttggtgcggctattattacttcagcagacattaaagcaggtctgcataaaatgatttctgaaacgggttacggtattccagttttcttagtaacggatgaaaacccagtttcggcagaagattacgtttggctaactggcgttatcgatttagaaagacaatctattgagtactactgtcgtcaaatcaacgaagcagtaaccaagtacgaatgtcgtctgcttcctcctttcttcaagcaattaacgcactatgttgagatgggtaactcagcgtttgactgtccgggacaccaaggtggtcagttcttcaaaaaacacccagctggtaaacaattctacgatttctttggcgaaaacctgttccgtagtgacttgtgtaacgcggacgtggatttaggtgacttgctgatccacgaaggttctgcacaccaagcgcaagcgcacgctgcaaaagtatttaacgcggacaaaacttacttcgtactcaacggtacttctgcttcaaacaaagtggtgtgtaacgcgctagtaactgaaggtgatttggtactgttcgaccgtaacaaccacaaatcgaaccaccacggtgcgttaatccaagcgggtggtatgccagtttacttagaaacggcgcgtaacccttggggcttcatcggtggtatggatgagcactgtttcgatgaagaatacattcgtgctcaaatcgcgaaagtggatccagaacgtgcacgcgatgaacgtcctttccgtcttgctattatccagcttggtacttacgacggtactatctataacgctcgctacgtgatggataagatcggtcatctttgtgactacatcctgtttgactctgcgtgggttggttatgagcagttcatccctatgatgaaagactgttcaccactgctgctggatttgaaaccagaagacgcaggtgtgatcgtgactcagtctgttcacaaacaacaagctggtttctctcaaacatcgcaaatccacaaaaaagaccgccatatcaaaggtcaagctcgttactgtaaccacaaacgctttaacaacgcgtttatgatgcacgcatcgacttcaccattctacgcactgttctctgcgcttgatgtgaacgcgaagatccacgacggcgaagccggtctgcgtttatggcgcgatgcggttaagactggtatcgaagcgcgtaaagaaatccttaagagttgtgaattgattcgtccgttcattccagacgaagtcgaaggtcaaccttggggcagctacgacactgacgtgatcgcaacgaacaagaaattcttcatgtttgagccaaacgcaagctggcacaaatttgaaggttacggtgaaggtcaatacttcgttgacccatgtaaattgttgctaactactgcgggtattgcagaagacggcagctacgcagatttcggtattcctgcaacgctattggcgaacttccttcgtgaaaacggcatcatccctgagaagtgtgacttgaactctatcttgttcctactcactcctgcggaagatatgggtaagatccgtcaccttgtggctcaaattaaccgattcgaaaaattcatccgtgatgatgcgcctctaagtatcgtacttccaagcgtctacgaagcgaataaagaacgctaccgtggctacaccatccgtcagctatgtcaggaaatgcatgacatgtacaaagagctgaacgtgaaacagctacaaaaagcgatgttccgcagcgagtacttcccacaaatggttcacaaaccagacgtggcaacacgcaaatacttccgtggtgaatgcgattacctaccacttaaagaggccgttggtcgcgtagccgctgagggtgcacttccttaccctccaggcatcatctgtgtgatcactggtgaaatctggaccccacacgtggtggattacttcctatctctagaagaaggcatcaaccgcttcccaggcttcgcgccagaaattcaaggcgtgtaccttgaagatgttaacggtcgcactaccgcacattgttatgtcctaaaagattaa

SEQ ID NO: 157364 - protein, 726 aa, Vibrio parahaemolyticus RIMD 2210633
MKRLIIGVSNYMPEDFSLLAESLDEQFNRHLQPLEQVELTDVGAAIITSADIKAGLHKMISETGYGIPVFLVTDENPVSAEDYVWLTGVIDLERQSIEYYCRQINEAVTKYECRLLPPFFKQLTHYVEMGNSAFDCPGHQGGQFFKKHPAGKQFYDFFGENLFRSDLCNADVDLGDLLIHEGSAHQAQAHAAKVFNADKTYFVLNGTSASNKVVCNALVTEGDLVLFDRNNHKSNHHGALIQAGGMPVYLETARNPWGFIGGMDEHCFDEEYIRAQIAKVDPERARDERPFRLAIIQLGTYDGTIYNARYVMDKIGHLCDYILFDSAWVGYEQFIPMMKDCSPLLLDLKPEDAGVIVTQSVHKQQAGFSQTSQIHKKDRHIKGQARYCNHKRFNNAFMMHASTSPFYALFSALDVNAKIHDGEAGLRLWRDAVKTGIEARKEILKSCELIRPFIPDEVEGQPWGSYDTDVIATNKKFFMFEPNASWHKFEGYGEGQYFVDPCKLLLTTAGIAEDGSYADFGIPATLLANFLRENGIIPEKCDLNSILFLLTPAEDMGKIRHLVAQINRFEKFIRDDAPLSIVLPSVYEANKERYRGYTIRQLCQEMHDMYKELNVKQLQKAMFRSEYFPQMVHKPDVATRKYFRGECDYLPLKEAVGRVAAEGALPYPPGIICVITGEIWTPHVVDYFLSLEEGINRFPGFAPEIQGVYLEDVNGRTTAHCYVLKD

SEQ ID NO: 157365 - DNA, 2271 bp, Bordetella parapertussis 12822
  CDS (1)..(2271): transl_table=11
atgaaattccgcttccccattttcatcatcgacgaagactatcgctccgagaacgcctcggggttgggcattcgcgcgctggcttcggcgatcgaggccgagggcgtggaggtcatcggggtgaccagctacggcgacctgagctcgtttgcccagcagcaaagccgcgccagcgccttcatcctgtcgatcgacgatgaggagttcgacgtcgattctccggaagacgtggcgggcgcgatcaagaacctgcgcacgttcatcggcgagctgcgtttccgcaacgccgacatccccatctacctgtacggcgagacgcgcacgtcggaacacatcccgaacgacatcctgcgcgagctgcacggcttcatccacatgttcgaggacacgccggagttcgtggcgcgccacatcatccgcgaagcgcgcagctacgtggacggcctgctgccgccgttcttccgcgagttggtcaaatatgcccaggacggttcgtattcctggcactgcccggggcactcgggcggcgtggcgttcctcaagagcccggtgggccagatgttccaccagttcttcggcgagaacatgctgcgcgccgacgtctgcaacgcggtcgacgaactgggccagctgctggaccacaccggcccggtggccgagtccgagctgaatgccgcgcgcattttccatgccgaccactgcttcttcgtcaccaacggcacctcgacgtcgaacaaggtcgtctggcatgccaacgtggccgccggcgacgtggtggtggtggaccgcaactgccacaagtcgatcctgcacgccatcacgatgaccggcgcgatcccggtgttcctgcgccccacgcgcaaccacctgggcatcatcggtccgatcccgctcgacgaattcgacccggagaacatccgccgcaagatcgaggccaacccgttcgcgcgcgaggcgctgaacaagaagccgcgcatcctcacgctgacgcagagcacctatgacggcgtcatctacaacgtcgagatgatcaaggaaaagctgggcacctacgtcgacacgctgcatttcgacgaggcctggctgccgcacgcggccttccacgagtactaccgcgacatgcacgcgatcggcccggaccgcccgcgcagccaggacgccatggtgttcgccacgcactccacgcacaagctgctggccggcatctcgcaggcctcgcagatcatcgtgcaggagtccgagagccgcaagctggaccgcaacctcttcaacgaggcctacctgatgcatacgtcgacctcgccgcagtacgcgatcatcgcgtcgtgcgacgtggccgccgccatgatggagccgccgggcggcaccgccctggtcgaggaaagcatccgcgaggccatggactttcgccgcgccatgcgcaaggtggcctccgagttcggcaaggacgactggtggtttaaggtgtggggccccaaccgcctcgcgcccgagggcatcggccatcgcgacgactgggtgctggagtcgggcgaccactggcacggctttggcgacctggcgccgggcttcaacatgctcgacccgatcaaggccaccatcatcaccccgggcctggacatgtcgggcagcttcggcgaaagcggcataccggccgcgctggtgtcgaagtacctggccgagcacggcgtcgtggtggagaagaccggcctgtattcgttcttcatcctgttcaccatcggtatcaccaagggccgctggaacaccctgctgaccgcgctgcagcagttcaaggacgactacgaccgcaaccagcccctgtggcgtatcctgcccgagttctgccgcggtcaccgccgctacgagcgcatgggcctgcgcgacctgtgccagcagatccacgaggcctatcgcgaacgcgacgtggcgcgcctgaccaccgagatgtacctgagcgacatggtgccggcgctcaagccctcggacgccttcgcccgcatggcgcaccgcgaagtcgagcgcgtcgagatcgaccagctcgaaggccgcgtgaccggcgtgctgctcacgccgtacccgccgggcattccgctgctgatcccgggcgagcgcttcaaccggaccatcgtgcaatacctgcagttcgcgcgcgagttcaacgagcgcttccccggcttcgagacctacatccacggcctggccgacgaagagggccccgatggcgccaagcgctattacgtcgactgcctgaaggacgccggcgagcagtaa

SEQ ID NO: 157366 - protein, 756 aa, Bordetella parapertussis 12822
MKFRFPIFIIDEDYRSENASGLGIRALASAIEAEGVEVIGVTSYGDLSSFAQQQSRASAFILSIDDEEFDVDSPEDVAGAIKNLRTFIGELRFRNADIPIYLYGETRTSEHIPNDILRELHGFIHMFEDTPEFVARHIIREARSYVDGLLPPFFRELVKYAQDGSYSWHCPGHSGGVAFLKSPVGQMFHQFFGENMLRADVCNAVDELGQLLDHTGPVAESELNAARIFHADHCFFVTNGTSTSNKVVWHANVAAGDVVVVDRNCHKSILHAITMTGAIPVFLRPTRNHLGIIGPIPLDEFDPENIRRKIEANPFAREALNKKPRILTLTQSTYDGVIYNVEMIKEKLGTYVDTLHFDEAWLPHAAFHEYYRDMHAIGPDRPRSQDAMVFATHSTHKLLAGISQASQIIVQESESRKLDRNLFNEAYLMHTSTSPQYAIIASCDVAAAMMEPPGGTALVEESIREAMDFRRAMRKVASEFGKDDWWFKVWGPNRLAPEGIGHRDDWVLESGDHWHGFGDLAPGFNMLDPIKATIITPGLDMSGSFGESGIPAALVSKYLAEHGVVVEKTGLYSFFILFTIGITKGRWNTLLTALQQFKDDYDRNQPLWRILPEFCRGHRRYERMGLRDLCQQIHEAYRERDVARLTTEMYLSDMVPALKPSDAFARMAHREVERVEIDQLEGRVTGVLLTPYPPGIPLLIPGERFNRTIVQYLQFAREFNERFPGFETYIHGLADEEGPDGAKRYYVDCLKDAGEQ

SEQ ID NO: 157367 - DNA, 2271 bp, Bordetella bronchiseptica RB50
  CDS (1)..(2271): transl_table=11
atgaaattccgcttccccattttcatcatcgacgaagactatcgctccgagaacgcctcggggttgggcattcgcgcgctggcttcggcgatcgaggccgagggcgtggaggtcatcggggtgaccagctacggcgacctgagctcgtttgcccagcagcaaagccgcgccagcgccttcatcctgtcgatcgacgatgaggagttcgacgtcgattctccggaagacgtggcgggcgcgatcaagaacctgcgcacgttcatcggcgagctgcgtttccgcaacgccgacatccccatctacctgtacggcgagacgcgcacgtcggaacacatcccgaacgacatcctgcgcgagctgcacggcttcatccacatgttcgaggacacgccggagttcgtggcgcgccacatcatccgcgaagcgcgcagctacgtggacggcctgccgccgccgttcttccgcgagctggtcaaatatgcccaggacggttcgtattcctggcactgcccggggcactcgggcggcgtggcgttcctcaagagcccggtgggccagatgttccaccagttcttcggcgagaacatgctgcgcgccgacgtctgcaacgcggtcgacgagctgggccagctgctggaccacaccggcccggtggccgagtccgagctgaatgccgcgcgcattttccatgccgaccactgcttcttcgtcaccaacggcacctcgacgtcgaacaaggtcgtctggcatgccaacgtggccgccggcgacgtggtggtggtggaccgcaactgccacaagtcgatcctgcacgccatcaccatgaccggcgcgatcccggtgttcctgcgccccacgcgcaaccacctgggcatcatcggaccgatcccgctcgacgaattcgacccggaaaacatccgccgcaagatcgaggccaacccgttcgcgcgcgaggcgctgaacaagaagccgcgcatcctcacgctgacgcagagcacctatgacggcgtcatctacaacgtcgagatgatcaaggaaaagctgggcacctacgtcgacacgctgcatttcgacgaggcctggctgccgcacgcggccttccacgagtactaccgcgacatgcacgcgatcggcccggaccgcccgcgcagccaggacgccatggtgttcgccacgcactccacgcacaagctgctggccggcatctcgcaggcctcgcagatcatcgtgcaggagtccgagagccgcaagctggaccgcaacctcttcaacgaggcctacctgatgcatacgtcgacctcgccgcagtacgcgatcatcgcgtcgtgcgacgtggccgccgccatgatggagccgccgggcggcaccgccctggtcgaggaaagcatccgcgaggccatggactttcgccgcgccatgcgcaaggtggcctccgagttcggcaaggacgactggtggttcaaggtgtggggccccaaccgcctcgcgcccgagggcatcggccatcgcgacgactgggtgctggagtcgggcgaccactggcacggctttggcgacctggcgccgggcttcaacatgctcgacccgatcaaggccaccatcatcaccccgggcctggacatgtcgggcagcttcggcgaaagcggcataccggccgcgctggtgtcgaagtacctggccgagcacggcgtcgtggtggagaagaccggcctgtattcgttcttcatcctgttcaccatcggtatcaccaagggccgctggaacaccctgctgaccgcgctgcagcagttcaaggacgactacgaccgcaaccagcccctgtggcgcatcctgcccgagttctgccgcggtcaccgccgctacgagcgcatgggcctgcgcgacctgtgccagcagatccacgaggcctatcgcgaacgcgacgtggcgcgcctgaccaccgagatgtacctgagcgacatggtgccggcgctcaagccctcggacgccttcgcccgcatggcgcaccgcgaagtcgagcgcgtcgagatcgaccagctcgaaggccgcgtgaccggcgtgctgctcacgccgtacccgccgggcattccgctgctgatcccgggcgagcgcttcaaccggaccatcgtgcaatacctgcagttcgcgcgcgagttcaacgagcgcttccccggcttcgagacctacatccacggcctggccgacgaagagggccccgatggcgccaagcgctattacgtcgactgcctgaaggacgccggcgagcagtaa

SEQ ID NO: 157368 - protein, 756 aa, Bordetella bronchiseptica RB50
MKFRFPIFIIDEDYRSENASGLGIRALASAIEAEGVEVIGVTSYGDLSSFAQQQSRASAFILSIDDEEFDVDSPEDVAGAIKNLRTFIGELRFRNADIPIYLYGETRTSEHIPNDILRELHGFIHMFEDTPEFVARHIIREARSYVDGLPPPFFRELVKYAQDGSYSWHCPGHSGGVAFLKSPVGQMFHQFFGENMLRADVCNAVDELGQLLDHTGPVAESELNAARIFHADHCFFVTNGTSTSNKVVWHANVAAGDVVVVDRNCHKSILHAITMTGAIPVFLRPTRNHLGIIGPIPLDEFDPENIRRKIEANPFAREALNKKPRILTLTQSTYDGVIYNVEMIKEKLGTYVDTLHFDEAWLPHAAFHEYYRDMHAIGPDRPRSQDAMVFATHSTHKLLAGISQASQIIVQESESRKLDRNLFNEAYLMHTSTSPQYAIIASCDVAAAMMEPPGGTALVEESIREAMDFRRAMRKVASEFGKDDWWFKVWGPNRLAPEGIGHRDDWVLESGDHWHGFGDLAPGFNMLDPIKATIITPGLDMSGSFGESGIPAALVSKYLAEHGVVVEKTGLYSFFILFTIGITKGRWNTLLTALQQFKDDYDRNQPLWRILPEFCRGHRRYERMGLRDLCQQIHEAYRERDVARLTTEMYLSDMVPALKPSDAFARMAHREVERVEIDQLEGRVTGVLLTPYPPGIPLLIPGERFNRTIVQYLQFAREFNERFPGFETYIHGLADEEGPDGAKRYYVDCLKDAGEQ

SEQ ID NO: 157369 - DNA, 2181 bp, Vibrio vulnificus YJ016
  CDS (1)..(2181): transl_table=11
atgaagcgtttagttattggtgttagtaattacatgccagaagattttagtttattagctgaatctttagatgaacaatttaatcgtcatcttcatcctttagagcaagtagaattaaccgatgttggtgctgccattattacgtcggcagatattaaggctggtctacacaaagtgatttctgaaacgggttatggcattccggttttcttggtcacagatgaaaacccagtgtcagccgaagattacgtatggttaaccggcgttatcgatttagaaagacaatccattgaatactactgtcgccaaatcaatgaagcggtaaccaaatacgaatgccgcctattgccgcctttcttcaaacaactgacgcactacgtggaaatgggcaactctgcattcgactgtccaggacaccaaggcggtcagttcttcaaaaaacacccagcaggtaaacagttctacgatttcttcggtgaaaacctattccgtagtgacttgtgtaacgcggacgtagatttaggtgacttgttgatccacgaaggctctgcccaccaagctcaagcgcacgcagcaaaagtgttcaactcagacaaaacttacttcgtactcaacggcacttcggcttcaaacaaagtggtttgtaacgcgttagtgaccgagggtgacttggtgatgtttgaccgtaacaaccacaaatcaaaccaccacggcgcattaatccaagcgggcggtatgccagtttacctagaaacggcgcgtaacccttggggctttattggtggcatggatgagcactgttttgatgaagaatacatccgtgcccaaatcgccaaagtatcacccgaacgtgcgcgtgatgcgcgtccattccgtcttgcgatcatccaattgggtacttacgacggtaccatctacaacgcacgctacgtgatggataagattggtcatctatgtgactacatcctgtttgactcggcatgggtaggctacgagcagttcattcctatgatgaaagactgttcgccactgctactggatctgaaaccagaagatgcgggtgtgatcgtgactcagtctgttcacaagcagcaagcaggcttctctcaaacctcgcaaatccacaaaaaagaccaccacatcaaaggtcaggctcgctactgcaaccacaaacgcttcaacaacgcgtttatgatgcacgcgtcaacctcacctttctacgcactgttctccgcattggatgtgaacgcgaagatccacgatggtgaagcgggtctgcgcctatggcgtgatgcggttaagacaggtatcgaagcgcgtaaagaaatcctcaaaagttgtgagctgatccgtccgttcattccagaccaagttgatggtcaaccatggggcagctacgacacggatgtcatcgccaccaacaagaaattcttcatgtttgagccaaacgcaagctggcataaattcgaaggttacggcgaaggccaatacttcgttgacccatgtaaattgctactcaccacagccggtattgccgaagatggtagctacgcagactttggtattcctgccacgctattggcgaacttcctacgtgagaacggcatcatccctgagaagtgtgacttgaactctatcttgttccttcttactccagcagaggacatgggtaagatccgtcatcttgtggcgcaaattaaccgcttcgagaaattcattcgtgatgatgcgccgctaaacatcgtgctgcctcgcgtttacgaagcgaacaaagagcgctaccgtggctacaccattcgtcagctatgtcaggaaatgcatgacatgtacaaagagctgaacgtgaaacagctacaaaaagcgatgttccgtagcgagtacttcccaaccatggtgcacaaaccggatgtggcaacacgcaaatacttccgcggcgagtgtgattacttgccgctgaaagaagcggtcggtcgtgtcgctgcagaaggtgcgcttccttaccctccaggcattatctgtgtgatcacgggcgaaatctggactcaacaagtggtcgattacttcttatctctagaagaaggcatcaaccgattcccaggcttcgcaccagagattcaaggtgtgtacctagaagacgtcaatggccgcaccaccgcccattgctacgcccttaaagattaa

SEQ ID NO: 157370 - protein, 726 aa, Vibrio vulnificus YJ016
MKRLVIGVSNYMPEDFSLLAESLDEQFNRHLHPLEQVELTDVGAAIITSADIKAGLHKVISETGYGIPVFLVTDENPVSAEDYVWLTGVIDLERQSIEYYCRQINEAVTKYECRLLPPFFKQLTHYVEMGNSAFDCPGHQGGQFFKKHPAGKQFYDFFGENLFRSDLCNADVDLGDLLIHEGSAHQAQAHAAKVFNSDKTYFVLNGTSASNKVVCNALVTEGDLVMFDRNNHKSNHHGALIQAGGMPVYLETARNPWGFIGGMDEHCFDEEYIRAQIAKVSPERARDARPFRLAIIQLGTYDGTIYNARYVMDKIGHLCDYILFDSAWVGYEQFIPMMKDCSPLLLDLKPEDAGVIVTQSVHKQQAGFSQTSQIHKKDHHIKGQARYCNHKRFNNAFMMHASTSPFYALFSALDVNAKIHDGEAGLRLWRDAVKTGIEARKEILKSCELIRPFIPDQVDGQPWGSYDTDVIATNKKFFMFEPNASWHKFEGYGEGQYFVDPCKLLLTTAGIAEDGSYADFGIPATLLANFLRENGIIPEKCDLNSILFLLTPAEDMGKIRHLVAQINRFEKFIRDDAPLNIVLPRVYEANKERYRGYTIRQLCQEMHDMYKELNVKQLQKAMFRSEYFPTMVHKPDVATRKYFRGECDYLPLKEAVGRVAAEGALPYPPGIICVITGEIWTQQVVDYFLSLEEGINRFPGFAPEIQGVYLEDVNGRTTAHCYALKD

SEQ ID NO: 157371 - DNA, 2358 bp, Rhodopseudomonas palustris CGA009
  CDS (1)..(2358): transl_table=11
atggactacttcaggcgtttcaccttcctgttctcggcaccgactttcgaggcggatgatctcgaaggcattcggttcaatcagatcgtcgcggagatcgagcggtccggcttcgagatcgtcaaggcgcgcaagctggaagatgccgagatcgcggtgcagaccgacgccgcgattggctgcatggtggtcgactggggcaagaagggcctcgagggcaagaccgccgcgctgatcaacctgatgcgccggcgcggtctcgatttcccgatcgtgctgctgatccgccgcaagaggttcgaggaagtgccggtcgaggtgctcgatttcatcgacggctacgtgtttctgtccgaggagacgccgaccttcatcgcccgcaacctgatcagccggctgaagcaatatgccgacacgctgaagacgccgttcttcggcgcgctggtcgactatgcggaggagggcaaccagctctggacctgccccggccacaacggcggcatgttctacagccgcagcccgatcgggcgggtgttcatcgagcatctcggcgaggcggtgttccgcgatgacctcgataattcggtgctcgaccttggcgatctgttgacccacgaggggccggcgctgcgcgcgcagaaggaagccgcgcagatcttcggtgccgagaagacctatttcgtgctcaacggcacctcgacctccaacaaggtcgccctcggcgcgctcgtctccgacggcgatctgatcctgttcgatcgcaacaatcacaaggcggcccatcacggcgcgctgatgatgggcggcggcattcccgtctacattcccacggttcgcaacgcctggggcctgatcgggccgatggcgtgggacgcgctggacgagacggcgctgcgcgaacgcattcgcagccatccgctggtcaaggaccctgaggcctggcgcaagccgcgcccgttccgcgtcgcggtggtcgaacagtgcacctacgacggcaccatccacagcgccgagatgatcctgcgccgcatcgggcatttgtgcgattacatcctgttcgacgaagcctgggccggcttcatgaagtttcatccgctgtatgccggccgcttcgcgatggggctggcgaacctcggcgacgatgcgcccggcatcatcgcgacgcagtcgacccacaagcagctcgccagtttctcccaggcgtcgcagatccacatcaaggatcgccacatccgcggccagaagcggcgggtcgagcatcggcgcttcaacgagagcttcatgcagcacgcctcgacgtcgccgttctatccgctgttcgcctcgctcgatgtcggcgcgcagatgatgaagggccgctccggcgaagtgctatgggacgatacgatccggcttggcatcgagctgcgcaagaagatccgcgcggtgcggagggagttcgaggagaaggaggcgcgggcggagcggcgctggttcttcgatccgttcgtgcccgatcgggtgacgatcgcggacgccgcccgtgaaggcgcggtgcacgatgtcgcctgggaggccgtgagcaccgaccagctcgcgaccgacccgacattctggcagatcgcgccgggcgcggcctggcacggctttgccgatatggcgcctggcttcgccatgaccgacccgaacaagctgacgctgctgacgccgggcttcgaccgggccaccggccgctatgccgagcacggcgtgccggcgccggtggtggcgcaatatctgcgcgagaaccgcattgttccggaaaagaacgatctcaactcgctgctatttctgctgacgccgggcgtcgaggcgagcaaggccggtacgctgatcagcggcctcgtcgcgttcaagaagctgcacgacgacaacgcgccgctcgacgaggtgatcccggaattcagccggcgccggcccgctcgctatgccggggtacggctgcgcgatttgtgcgggcagatgcaccggttcttccgcgacgccgatgtcagcgcgctgcaggccaagcagtttctgcccgaacatctacccgagatcgcgatgtcgccgcacgatgcggcgcgctgcctggtccgcaatgacgtcgactatctgccgatcagccagatcgcgggccggatcgccaccacgccgttcgtggtctatccgccggggatcgcgaccatcgtgcccggcgagcggctgagcgagcgagccaagccgatgctcgattacttgcagatgttcgagcgcagcttcaacgaattccccggcttcgaagtcgagattcagggcgtctatcgcgaattcgatgaattgggccgggttcgtctctacacctacgtcgtggccgaataa

SEQ ID NO: 157372 - protein, 785 aa, Rhodopseudomonas palustris CGA009
MDYFRRFTFLFSAPTFEADDLEGIRFNQIVAEIERSGFEIVKARKLEDAEIAVQTDAAIGCMVVDWGKKGLEGKTAALINLMRRRGLDFPIVLLIRRKRFEEVPVEVLDFIDGYVFLSEETPTFIARNLISRLKQYADTLKTPFFGALVDYAEEGNQLWTCPGHNGGMFYSRSPIGRVFIEHLGEAVFRDDLDNSVLDLGDLLTHEGPALRAQKEAAQIFGAEKTYFVLNGTSTSNKVALGALVSDGDLILFDRNNHKAAHHGALMMGGGIPVYIPTVRNAWGLIGPMAWDALDETALRERIRSHPLVKDPEAWRKPRPFRVAVVEQCTYDGTIHSAEMILRRIGHLCDYILFDEAWAGFMKFHPLYAGRFAMGLANLGDDAPGIIATQSTHKQLASFSQASQIHIKDRHIRGQKRRVEHRRFNESFMQHASTSPFYPLFASLDVGAQMMKGRSGEVLWDDTIRLGIELRKKIRAVRREFEEKEARAERRWFFDPFVPDRVTIADAAREGAVHDVAWEAVSTDQLATDPTFWQIAPGAAWHGFADMAPGFAMTDPNKLTLLTPGFDRATGRYAEHGVPAPVVAQYLRENRIVPEKNDLNSLLFLLTPGVEASKAGTLISGLVAFKKLHDDNAPLDEVIPEFSRRRPARYAGVRLRDLCGQMHRFFRDADVSALQAKQFLPEHLPEIAMSPHDAARCLVRNDVDYLPISQIAGRIATTPFVVYPPGIATIVPGERLSERAKPMLDYLQMFERSFNEFPGFEVEIQGVYREFDELGRVRLYTYVVAE

SEQ ID NO: 157373 - DNA, 2100 bp, Lactobacillus johnsonii NCC 533
  CDS (1)..(2100): transl_table=11
atgaattttctaaaaattgcattaagcaatcaacttaaaaataatgattttaattcatggcaaactactaatttgaacgatgaaactcaagctagtgaacttgccgctattgttgtagcagagactgataaaagtagtcttaaaactgctcaagatttacaaaaaaaatcagggcttggaattcctattattaaagtttcacatgaaacaatttctaataatgaaaaaaatcaaataattgatgccgcaaatcaatacacagcagaaatggttcctggctttttaactgatttggtcaatttcgcagaagatcgtccaattagttttacgacaccaggtcatcataatggcttatattacgaaaaacatccggcgggggtagtatttaatcgcttctttggtaaaaacctcatgtttgcggataccagtgatacagtaccagaattaggcgatactatgacccacgaagggacgcctttaactgctgagcaaaaagctgccgaaacttatcatgctgataaagtttatttctgtactaatggaacaacgagtgcaaattcaatttgtgcaagtgcactattaactaaagatgacctagttctttttgatcgaaataatcataaatccctctataacagtgccttagtaatgactggtgccaaacctgtatatattccaactgatcgtaatgcacttggattaattggagaaatggatcctgactttttaaatgaagaaaaaattcgagctgaaattgctaaagttgaccctgaaaaagctaaagctaagcgtccatttagactagctatcattcaatcagaaacatatgatggtcttttttacgacgcgaagtggatgattgataaaattggtaaactatgcgattacattctttttgattgtgcttggggtggattcgaacagtttgttccaattatgaatcacctgtctcccctcaacttagactttgggtcagaagatccgggtattttagtaactcaatcacttcataaacaacaagccggaatgggccaagcctcacaaattttgaaaaaggatgctcatattaaaggtcagaaacgttacgttgatcataagcactttaaccacgcttatcttaaatttgttacctcaagttactcttatccactttatgcctcactcaccgttaactcatatttaaccagcggtgagggtaataaaaaatggtgggaccaaatcttacgcttaggaattgaatggcggaaagaattaattaaaaaatcaaaattatttaagccactagtaattgataattttgaaaatattagtactgatgagttagctacaaatgaaaagtactggaatttagattccactaatctgtggcatggatttagcaaaattgcgtctggtcaggccatgatcgatcctctaaaaattactgttgtaactcccggaattgatgttaaaaatgcaaaatatgaagaaataggtattcctggaccagttgttgcagaatttttaatggagaagcggattattcgtgcaaaagatgacctatattctcttcttttcttattaacgccgggagatactaaggctgaattagatatcttgctgaatgcattcttagaatttgaacaatattataacgaggatgcacctctagacaaagtgctccctaagctaactaaagtatacggcgatcgctacaaaggttataccttaaaacagctctgccaagaaatgcatgaatattaccggggaaataatacctttaccctccagcaagaattatttgcgaaaccagatatgcaaaattatcaaatgactcccgagcatgctgactatctctttatgaaaaatgaaagtgaattagttaacttagaagatgttaaaggtcgcattgctgctgaaggtgccttaccttacccaccaggcgtgttcattgttgcgcccggcgaaaaatggagcgatattgatcaaaaatattttgaagttttagtaggtgctatcgagcgtttcccaggctttgtacctgaaattcagggagtctactgggatcaaaaatcagatggtaaaataagagtacaagcagaagtattaaaggagaattag

SEQ ID NO: 157374 - protein, 699 aa, Lactobacillus johnsonii NCC 533
MNFLKIALSNQLKNNDFNSWQTTNLNDETQASELAAIVVAETDKSSLKTAQDLQKKSGLGIPIIKVSHETISNNEKNQIIDAANQYTAEMVPGFLTDLVNFAEDRPISFTTPGHHNGLYYEKHPAGVVFNRFFGKNLMFADTSDTVPELGDTMTHEGTPLTAEQKAAETYHADKVYFCTNGTTSANSICASALLTKDDLVLFDRNNHKSLYNSALVMTGAKPVYIPTDRNALGLIGEMDPDFLNEEKIRAEIAKVDPEKAKAKRPFRLAIIQSETYDGLFYDAKWMIDKIGKLCDYILFDCAWGGFEQFVPIMNHLSPLNLDFGSEDPGILVTQSLHKQQAGMGQASQILKKDAHIKGQKRYVDHKHFNHAYLKFVTSSYSYPLYASLTVNSYLTSGEGNKKWWDQILRLGIEWRKELIKKSKLFKPLVIDNFENISTDELATNEKYWNLDSTNLWHGFSKIASGQAMIDPLKITVVTPGIDVKNAKYEEIGIPGPVVAEFLMEKRIIRAKDDLYSLLFLLTPGDTKAELDILLNAFLEFEQYYNEDAPLDKVLPKLTKVYGDRYKGYTLKQLCQEMHEYYRGNNTFTLQQELFAKPDMQNYQMTPEHADYLFMKNESELVNLEDVKGRIAAEGALPYPPGVFIVAPGEKWSDIDQKYFEVLVGAIERFPGFVPEIQGVYWDQKSDGKIRVQAEVLKEN

SEQ ID NO: 157375 - DNA, 2253 bp, Herminiimonas arsenicoxydans
  CDS (1)..(2253): transl_table=11
atgaaattccgttttcccatcgtcatcatcgatgaagatttccgttccgaaaacacgtccggactgggcatacgcgccttggccgaggcaatcgaaaaggaaggcatggaagtgctcggcgttaccagctacggcgacctgtcgcagttcgcgcaacagcaatcgcgcgcatccgctttcatcctgtccatcgacgatgaagaatttggcgccggttcgtttgaagaaaccgattacgcattgaaatcgctgcgcgccttcgtcgcagaaattcgtcacaagaacgctgacatcccgatttatctgtatggcgaaacgcgtacctcgcgtcatatcccgaatgacatcctgcgcgaactgcacggtttcattcacatgtttgaagacacgcccgagttcgtcgcgcgccacatcatccgcgaggcgaagtcctacatggacggcctgtcgccgccattcttccgcgcactcgtgcattacgcgcaggacggttcctactcatggcactgccctggccactccggcggcgtcgctttcctgaagtcgcctatcggccagatgttccatcaattctttggtgaaaacctgttgcgcgccgacgtctgcaatgcggtggaagaactcggccaattgctggatcataccggcccggtcgctgcatccgaacgtaatgccgcgcgcatcttcaatgccgatcactgctacttcgtcaccaacggcacctcgacctcgaacaagatggtctggcactcgactgtcgctccgggcgacatcgtggtggtcgatcgcaattgtcacaaatcgatactgcactcgatcatcatgtgcggcgcgattccggtgttcctgatgccgacgcgcaatcaccttggcatcatcggaccgattccgctatccgaattcacgatggaaaacatacgcgccaagatcgaagccaatccgtttgcccgtgaagccgtcaacaagaagccgcgcatcctgaccatcacgcaatcgacctacgatggcgtgatctacaacgtcgaaacgctgaaaaacatgctggacggcgaaatcgatacgctgcatttcgatgaagcctggctgccgcacgcgaccttccacgacttctacaaaaacatgcacgcgatcggcaaggaccgtccgcgcgcaaaagagtcgatgatcttctccacgcaatcgacgcacaaactgctggccggcctgtcgcaggcatcgcaaatcctggtgcgcgaatcggaaaaagtgaagctggatcaggatgctttcaatgaagcctacctgatgcatacctcgacctcaccgcagtattcgatcatcgcttcatgcgacgtcgcggccgccatgatggaagcaccaggcggtaccgcgctggtggaagaaagcatactggaagcactggatttccgccgtgcgatgaaaaaaatcgatcaggaatggggcagagactggtggttccaggtctggggcccggacagcttcagcgaagaaggcatcggtacccaggatgactggatgatccgtgccgaagacgactggcacggcttcggcaatctggctcccggcttcaacatgctcgatccgatcaaggccaccattgtcaatccgggtctgtcactggacggcaagttcggcgactccggcattcccgcgtccatcgtcaccaaatatctggccgagcatggcgtcatcattgaaaaatgcggcctgtactcgttcttcatcatgttcaccatcggcatcaccaaaggccgctggaacactctgctgaccgcgttgcagcagttcaaggacgattacgacaagaaccagccgatgtggcgcatcctgccggaatttgccgccgccaatccgcgctatgaaggcatcggcctgcgcgatctgtgccagcagattcacgacttctacaaactctatgatgtcgcacgtttgacgaccgaaatgtatctgtccgacatgcagccggcaatgaaaccatccgacgcattctcgaaaatggcgcatcgcgaaatcgaccgcgtgcctatcgacgaactggagggtcgcgtgacatcgatcttgctgacaccgtatccaccgggtatccctctgctgattccaggtgagcgtttcaataaaaccatcgtggattacctgaaatttgcacgcgatttcaacgagaaatttcctggctttgaaaccgatgtgcacggcctggtcaaacgcgaagtcgatggcaagcgcggctacttcgtggattgcgtgcggcaataa

SEQ ID NO: 157376 - protein, 750 aa, Herminiimonas arsenicoxydans
MKFRFPIVIIDEDFRSENTSGLGIRALAEAIEKEGMEVLGVTSYGDLSQFAQQQSRASAFILSIDDEEFGAGSFEETDYALKSLRAFVAEIRHKNADIPIYLYGETRTSRHIPNDILRELHGFIHMFEDTPEFVARHIIREAKSYMDGLSPPFFRALVHYAQDGSYSWHCPGHSGGVAFLKSPIGQMFHQFFGENLLRADVCNAVEELGQLLDHTGPVAASERNAARIFNADHCYFVTNGTSTSNKMVWHSTVAPGDIVVVDRNCHKSILHSIIMCGAIPVFLMPTRNHLGIIGPIPLSEFTMENIRAKIEANPFAREAVNKKPRILTITQSTYDGVIYNVETLKNMLDGEIDTLHFDEAWLPHATFHDFYKNMHAIGKDRPRAKESMIFSTQSTHKLLAGLSQASQILVRESEKVKLDQDAFNEAYLMHTSTSPQYSIIASCDVAAAMMEAPGGTALVEESILEALDFRRAMKKIDQEWGRDWWFQVWGPDSFSEEGIGTQDDWMIRAEDDWHGFGNLAPGFNMLDPIKATIVNPGLSLDGKFGDSGIPASIVTKYLAEHGVIIEKCGLYSFFIMFTIGITKGRWNTLLTALQQFKDDYDKNQPMWRILPEFAAANPRYEGIGLRDLCQQIHDFYKLYDVARLTTEMYLSDMQPAMKPSDAFSKMAHREIDRVPIDELEGRVTSILLTPYPPGIPLLIPGERFNKTIVDYLKFARDFNEKFPGFETDVHGLVKREVDGKRGYFVDCVRQ

SEQ ID NO: 157377 - DNA, 2154 bp, Erwinia carotovora subsp. atroseptica SCRI1043
  CDS (1)..(2154): transl_table=11
atgaaacagttaaaaattgcggcgaatgcagcggttgccacccgtttaatcacaacgcgcgagattgtcgcgttgagtcagactgacttcactgatgtggcggcggtcgtggtttctattgaggaagcccgtagcggtattctgtcgatattgcagcacaccggttttagtattccggcgtttgtcgaagagcctgatgaagataaagagtcagatgttctgcctgcgggcagcgaatggctgattcttgatgatgaaggtgagcacgcgagcgtgctggaacgtgcggctaaagcctatcaagatgcgttgctgccgccgtttttcgatacgctgaccaagtacgtcaaaatgaagaacacgacgtttgcctgcccagggcatcagggcggtcagttcttccgtaagcatccggcagggcgtcagttttttgagttttacggtgagaacgtttttcgttcggacatctgtaacgccgacgtcaaactgggcgatttgctgatccatgaaggggcggcgaagaaggcacagaagcacgctgcgcgggtgtttaacgccgataagacctatttcgtgttaaacggcacgtcctctgcgaacaaagtcgtgacaaacgcgctgttagcgcgtggcgatctggtgctgtttgaccgtaacaaccataaatccaaccatcacggtgcgctggttcaggcgggggcgacgcctgtctatctggaaaccgtgcgcaatccgtttggctttatcggtggtgtggatgcgcactgctttgacgaaacctatctgcgcaagctgattgcggaagtcgcgccggaacgtgctaacgagccacgcccgttccgtctagctgtcatccagcttggcacctatgacgggaccatttataacgctcgtcaggttgtcgatagcatcgggcacctgtgtgactacattctgtttgactcggcctgggtcggctacgagcagttcatcccgatgatggagcagtgctcgccgctgttgctggatctgaatgagaacgatccgggcatctttgtcacccagtcggtgcataagcagcaggcgggcttctcccagacctcgcagatccacaaaaaagatacgcatatcaaagggcagcgtcgtttttgcaaccataagcaactgaataacgcttttatgctgcatgcgtcgaccagcccgttttacccgctgttcgccgcgttggatgttaatgccaaaatgcacgaaggggccagcgggcgtcgtatgtggatggactgcgtgaagctgggcattgaggcacgtaagcaactgctgacgcgctgttcgctcatcaaaccgtttgtgcctgttacggtaggcggtgcgctctggcaggatcatgatacggagacgatcgcgcaggacgtgcgtttcttcaactttgagccgggcgagaaatggcacgcgttcgaagggtacgcggaagatcagtattttatcgatccgtgcaaattactgctgactacgccgggtattgatgcaattagcggcgattataccgaatttggtattccggcgacgatccttgctaactatctgcgcgagcacggcatcatccctgaaaaatgcgacatgaactcgatcctgttcctgttaacgccagcggaagacacggccaaaatgcaggagctggttaatgcgctggttcattttgaaacgctgatcgctcgtgatgcgccgctgagcgaagtgttgcccagcctgtatcagaaatacaaagagcgctaccgtggttatcgactgcgtcggttgtgtcaggaaatgcatgatttttatgcccagcacaacgtgaaagatctgcaaaaagcgatgttccgcaaaaccgagtttccgtcagtggcgatgttgccgcaggatgccaacagggaatttgtgcgcgggaatatcgagctggttcccatcgttgaagctgaaggacgtatcgcggcggaaggtgcattgccatacccgccgggcgtgctgtgtgtggtaccgggggaagcctggggcggagcggtacagcgctattttctggcgctggaggatgggattaacctgctgcccggtttttcaccggaattgcagggggtttacagcgttgcggaagaagatggccgcaaacggctgtacggctacgtggtagaaaagtaa

SEQ ID NO: 157378 - protein, 717 aa, Erwinia carotovora subsp. atroseptica SCRI1043
MKQLKIAANAAVATRLITTREIVALSQTDFTDVAAVVVSIEEARSGILSILQHTGFSIPAFVEEPDEDKESDVLPAGSEWLILDDEGEHASVLERAAKAYQDALLPPFFDTLTKYVKMKNTTFACPGHQGGQFFRKHPAGRQFFEFYGENVFRSDICNADVKLGDLLIHEGAAKKAQKHAARVFNADKTYFVLNGTSSANKVVTNALLARGDLVLFDRNNHKSNHHGALVQAGATPVYLETVRNPFGFIGGVDAHCFDETYLRKLIAEVAPERANEPRPFRLAVIQLGTYDGTIYNARQVVDSIGHLCDYILFDSAWVGYEQFIPMMEQCSPLLLDLNENDPGIFVTQSVHKQQAGFSQTSQIHKKDTHIKGQRRFCNHKQLNNAFMLHASTSPFYPLFAALDVNAKMHEGASGRRMWMDCVKLGIEARKQLLTRCSLIKPFVPVTVGGALWQDHDTETIAQDVRFFNFEPGEKWHAFEGYAEDQYFIDPCKLLLTTPGIDAISGDYTEFGIPATILANYLREHGIIPEKCDMNSILFLLTPAEDTAKMQELVNALVHFETLIARDAPLSEVLPSLYQKYKERYRGYRLRRLCQEMHDFYAQHNVKDLQKAMFRKTEFPSVAMLPQDANREFVRGNIELVPIVEAEGRIAAEGALPYPPGVLCVVPGEAWGGAVQRYFLALEDGINLLPGFSPELQGVYSVAEEDGRKRLYGYVVEK

SEQ ID NO: 157379 - DNA, 2163 bp, Yersinia pseudotuberculosis IP 32953
  CDS (1)..(2163): transl_table=11
atgacactattaaaaatagcaacaagcgcccgcctggcttcttatgtagaaactcagcgcggagtggtgtacctcaatcagactgattttactgatgttgccgcggtggtaatgtcggttgaagatgcaaatgcgggtatattgtcaatgctgcatgaccttggttttgctattcctgcgtttattgccgtgacggcagaacagacggtctctgctgattatttgcccttgattaaaggtgtcattacgcttggtgaagcaaataaagctttttataacgctcaggtagaagctgccgccagtgaatatcaaaagaatctcttaccgccttttttctcaacactgaaaaaatatgtcgagatgaataactcgacctttgcttgccctggccatcaagggggcgaattttttcgcaagcatcctgcaggacgccagttttttgaattctacggtgagacgatttttcgttcagatatgtgtaatgccgatgtcaaattaggtgatttacttatccatgaaggggcggcaaaagatgcacagaaatatgctgctaaggtattcaatgccgataaaacctattttgtcctgaacgggacctcggcggccaacaaggtcgtgaccaacgctctactgacccgtggtgatttagtgttgtttgaccgcaataaccataaatctaaccatcatggtgcgctgatccaggcgggcgcgacgccggtttatctggaaacggctcgtaacccctttggttttattggtggtattgatgcgcactgcttcaatgaagattatttacgtcaacaactgcgtgaagttgctcccgagcgtgcagaagaggctcggccattccgattagcgatcattcaattgggtacctacgacggtacggtatataacgcccgccaagtagttgatagtattggtcatttatgcgattacattttgtttgattctgcttgggtgggttacgaacaatttattccgatgatgaaggatttctcaccgttattactggaattaaatgaaaatgaccctgggattattgtgactcaatcggtacacaagcagcaggccggtttttctcagacctctcaggtacataaaaaagataatcacattaaaggacagaaacgtcactgtaaccataagcgttttaataatgcctttatgttgcatgcatcgaccagtccgttttatccattatttgcggcattggatgttaatgccaaaatacactctggtgacagtggccgccgtatgtggatggattgtgtaaaactcggtattgaaacccgtaaatcgttattggcacgctgttcgatgttacggccttttattcctccagttgttggcggtaaaaattggcaagattatgctactgatgtgattgccaatgatgcgcgcttctttaattttgtcccagatgaacgctggcatggatttgagggatataaccaagatcagtatttggttgatccgtgcaaattattgctgacgacgccgggaattgatgccagcactggccgatatacttcgtttggtattccggcggctattttggcgactttcctgcgtgaaaatgggattgtgccagaaaaatgtgatcttaactcgatcctattcctgctgaccccggcagaaaataccgccaaaatggcacacctggtggatatgttggtgcagtttgaacgctatgttgaacaagatgcgaagctgtgtgatgtattaccgacgatctatcgtaagaatgaagagcgttatcacggttataccttgcgtcagttatgccaagaaatgcatgacctgtacgtcagccatgacgttaagcaattgcaaaaggatatgttccgtaaagccagtttcccgcgggtagtcatgaacccgcaagacgccaatattcagtttatccgcgataatattgagttgattcctattgctgaagctgaaggccgtattgccgccgaaggcgctttgccttatccaccgggtgtgctgtgtgtggtgcccggtgaagtgtggggtggggcggttcagcgttattttctggcgctggaagaggggattaacttactgccgggcttttcacctgagttacagggcgtttatatcgaaaaaggtgatgtgtcttggcggcgtatctttggttatgtgattacgcaatag

SEQ ID NO: 157380 - protein, 720 aa, Yersinia pseudotuberculosis IP 32953
MTLLKIATSARLASYVETQRGVVYLNQTDFTDVAAVVMSVEDANAGILSMLHDLGFAIPAFIAVTAEQTVSADYLPLIKGVITLGEANKAFYNAQVEAAASEYQKNLLPPFFSTLKKYVEMNNSTFACPGHQGGEFFRKHPAGRQFFEFYGETIFRSDMCNADVKLGDLLIHEGAAKDAQKYAAKVFNADKTYFVLNGTSAANKVVTNALLTRGDLVLFDRNNHKSNHHGALIQAGATPVYLETARNPFGFIGGIDAHCFNEDYLRQQLREVAPERAEEARPFRLAIIQLGTYDGTVYNARQVVDSIGHLCDYILFDSAWVGYEQFIPMMKDFSPLLLELNENDPGIIVTQSVHKQQAGFSQTSQVHKKDNHIKGQKRHCNHKRFNNAFMLHASTSPFYPLFAALDVNAKIHSGDSGRRMWMDCVKLGIETRKSLLARCSMLRPFIPPVVGGKNWQDYATDVIANDARFFNFVPDERWHGFEGYNQDQYLVDPCKLLLTTPGIDASTGRYTSFGIPAAILATFLRENGIVPEKCDLNSILFLLTPAENTAKMAHLVDMLVQFERYVEQDAKLCDVLPTIYRKNEERYHGYTLRQLCQEMHDLYVSHDVKQLQKDMFRKASFPRVVMNPQDANIQFIRDNIELIPIAEAEGRIAAEGALPYPPGVLCVVPGEVWGGAVQRYFLALEEGINLLPGFSPELQGVYIEKGDVSWRRIFGYVITQ

SEQ ID NO: 157381 - DNA, 2253 bp, Azoarcus sp. EbN1
  CDS (1)..(2253): transl_table=11
atgcgctttcactttccgatcatcataatcgacgaggatttccgctcggaaaacacgagcggcctcggcattcgcgcactggccaaggcgatcgaggaagagagcatggaagtgctcggggtcacgagttacggtgacctgacctcgttcgcgcagcagcaaagtcgtggttcagccttcatcctgtcgatcgacgacgaggagttttcgtcgcctgaggcgtccgacaaggccatcgccgacctgcgtgcgttcgtcgaggagatccggttgcgcaacgccgacatcccgatcttcatccacggcgaaacccgtaccagccggcacatcccgaatgacgtgctgcgcgagctgcacggtttcatccacatgttcgaggatacgcccgagttcgtcgcccgctatatcgtgcgcgaagcaaagaactacctcgagagcctggcgccgccgtttttccgcgcgctggtgcattacgctgccgacagctcgtattcgtggcactgcccgggccattcgggcggtgtggcgttcctgaaaagtccggtcgggcagatgttccaccagttcttcggcgaaaacatgctgcgcgcagatgtgtgcaacgcggtcgaggaactcggtcagctgctcgaccatacgggtcccgtggccgcttccgaacgcaacgctgcacgcatcttcaactgcgaccatctctatttcgtcaccaacggcacctcgacgtcgaacaagatggtgtggcacacgacggtcgcgcccggcgacatcgtggtcgtggatcgcaactgccacaaatcgattctccactcgatcatcatgactggagcggtgccggtgttcctgacgccgacacgtaaccactacggcatcatcggtccgatcccgctggaagaattcagcatggagacgatccggcgcaagatcgaggcgaacccgttcgcacgcccgagcgccggcaagaagccccgcattctgacgatcacgcagtcgacgtacgacggggttgtgtacaacgtcgagacgatcaaggagatgctcgacggcgagatcgatacgctgcactttgacgaagcctggctgccgcacgccgcgttccatgatttttacggcgattaccatgcgatcggggccgaccgcccgcgctgcgagaaatcgatggtgttctcgacgcagtcgacgcacaagctgctggccggtctgtcccaggcttcgcagatcctcgtgcaggactcgcagactcgcaagctcgaccgcgacatcttcaacgaagcctacctgatgcacacttcgacgtcgccgcagtacgcgatcatcgcttcgtgcgacgtcgcggcggcgatgatggagcctcccggggggccggcgctggtggacgagtcgctagcggaagccgtcgaattccgccgggcgatgcgcaaggtggaagccgagttcggtcctgctgactggtggttcaaggtctgggggcccgaatatctgcccgaggaagggatcggcgagcgggaggactggatgctcaaggccggcgaacgctggcacggctttggcaatctcgcgccgggcttcaacatgctcgacccgatcaaggcgacggtgatcacgccggggctggacgtcgacggcgactttgccgattccggcatccctgccgggatcctcacccgttatctcgctgagcacggcatcatcgtcgaaaagaccgggctgtactcgttcttcatcatgttcacgatcggtatcacgaagggccggtggaacacgatggtgaccgaattgcagcagttcaaggacgactacgaccgcaaccagccgttgtggcgcgtaatgccggaattcattgcgaagcatccgcgctacgagaaagtcggcctgaaggacttatgcgcgcagatccacagtttctacaagtcgtacgatattgcgcggctcacgaccgaaatgtatttgtcggatatggttccggcgatgaagccggccgatgcgttcgcgaagatggcgcatcgcgagatcgagcgggtgccgatcgatgaactcgaggggcgtgtgaccgcgatgctcgtcacgccctatccgccagggatcccgttactgattccaggcgagcgtttcaacgcgacgatcgtgcgttacctgaagtttgcgcgtgatttcaacgcgggctttcctgggttcgagaccgatatccacggcctcgtcagggaacgcgcagagggacggttcgactattacgtcgactgtgtgaggcaggactga

SEQ ID NO: 157382 - protein, 750 aa, Azoarcus sp. EbN1
MRFHFPIIIIDEDFRSENTSGLGIRALAKAIEEESMEVLGVTSYGDLTSFAQQQSRGSAFILSIDDEEFSSPEASDKAIADLRAFVEEIRLRNADIPIFIHGETRTSRHIPNDVLRELHGFIHMFEDTPEFVARYIVREAKNYLESLAPPFFRALVHYAADSSYSWHCPGHSGGVAFLKSPVGQMFHQFFGENMLRADVCNAVEELGQLLDHTGPVAASERNAARIFNCDHLYFVTNGTSTSNKMVWHTTVAPGDIVVVDRNCHKSILHSIIMTGAVPVFLTPTRNHYGIIGPIPLEEFSMETIRRKIEANPFARPSAGKKPRILTITQSTYDGVVYNVETIKEMLDGEIDTLHFDEAWLPHAAFHDFYGDYHAIGADRPRCEKSMVFSTQSTHKLLAGLSQASQILVQDSQTRKLDRDIFNEAYLMHTSTSPQYAIIASCDVAAAMMEPPGGPALVDESLAEAVEFRRAMRKVEAEFGPADWWFKVWGPEYLPEEGIGEREDWMLKAGERWHGFGNLAPGFNMLDPIKATVITPGLDVDGDFADSGIPAGILTRYLAEHGIIVEKTGLYSFFIMFTIGITKGRWNTMVTELQQFKDDYDRNQPLWRVMPEFIAKHPRYEKVGLKDLCAQIHSFYKSYDIARLTTEMYLSDMVPAMKPADAFAKMAHREIERVPIDELEGRVTAMLVTPYPPGIPLLIPGERFNATIVRYLKFARDFNAGFPGFETDIHGLVRERAEGRFDYYVDCVRQD

SEQ ID NO: 157383 - DNA, 2256 bp, Pseudomonas fluorescens Pf-5
  CDS (1)..(2256): transl_table=11
atgtataaagacctgcagtttccgatcctgatcgtgcatcgcgacatcaaggccgatacggtcgcgggggaccgggtcagggggatcgcccgggaactggaaaaggacgggttcagcatcttttccgcggtggactatgccgaagggcggctggtggcttcgacccatcacggcctggcctgcatgttgatcgccgccgaaggggccggggaaaacaagcacctgttgcagaacatggtggaactgatccgcctggcgcgggtacgtgcgccgctgctgccgatctttgccctgggcgagcaggtgaccctggaaaacgcccccgccgacgccatgagcgaactcaaccagctgcggggcattctctacctgttcgaggacacggtgccgttcctggcccggcaagtggcccgggccgcgcggggctacctggatggcttgctgccaccgttcttcaaggccctggtacagcacaccgccgactccaactattcctggcacaccccggggcacggcggtggcgtggcctatcgcaagagcccggtggggcaggcgtttcaccagttctttggcgagaacaccttgcgttcggacctgtcggtgtcagtccctgagctggggtcgctgctggatcacaccggcccgctggcggaagccgaggcccgtgccgcgcgcaactttggcgccgatcacacctttttcgtgatcaatggcacctccaccgccaacaagatcgtctggcattccatggtcggtcgcgatgacctggtgctggtggaccgcaactgccacaagtcggtgctgcactcgatcatcatgaccggggccattcccctgtacctgtgcccggagcgcaacgaactggggatcatcgggccgattcccctgagcgagttcagcgccgagtcgatccaggccaagatcgatgccagcccgctgacccgcggccggccgcccagggtcaagctggcggtggtcaccaactccacttatgacggcctgtgctacaacgccgagctgatcaagcagagcctgggcaacagtgtcgaggtgctgcacttcgacgaagcctggtacgcctatgcggcctttcatgagttcttcgccgggcgctacggcatgggcacgtcccgcagcgacgacagcccgctggtgttctccacccattccacccacaagctgctggcggccttcagccaggcctcgatgattcacgtgcaggatggcggcgcccggcaactggaccgcgaccgcttcaacgaagccttcatgatgcatatctccacctcgccgcagtacagcatcatcgcctcgctggacgtggcttcggcgatgatggaagggccggccgggcgctcgctgctgcaggaaatgttcgacgaggccctgagctttcgccgggccctggccaacctgcggcagaacatcgccgccgatgactggtggttctcggtgtggcaaccggagcgggtcgagggcatcgaccaggtgcgcaccgaggactggctgctggaacctgagggcgagtggcacggttttgccggggtcaccgatgactatgtgctgctggacccgatcaaggtgaccctggtcatgcccggcctgaccgcgggcggcgccctgagcgagcacgggatcccggcggcggtggtcagcaagtttctctgggagcgcgggctggtggtggaaaagaccgggctctattcgttcctggtgctgttctccatgggcatcaccaagggcaagtggagcacgctgctcaccgaactgctggagtttaagcgcaactacgacgccaatgtcagcctggccagctgcctgcccagcgtggccgggcaggacccgcagcgctaccagggcatgggcctgcaggacctgtgcgaccagttgcacgcctgctaccgcagcaacgccacggccaagcacctcaagcgcatgtacacggtgctgccggaggtggccatgaagcctgccgatgcctatgaccatctggtgcggggcgaggtcgaggcggtttccatcgatcagttgcaggggcgtatcgctgcggtgatgctggtgccctatccgccgggcattccgctgatcatgccgggcgagcgtttcaccgattccacccgttcgatcatcgattacctggccttcgcccgggcctttgacagcagcttcccggggtttgtcgccgatgtgcacgggctgcagcatgacgatctgggcgacgggcgccagtacaccgtcgattgcatcaaggcatga

SEQ ID NO: 157384 - protein, 751 aa, Pseudomonas fluorescens Pf-5
MYKDLQFPILIVHRDIKADTVAGDRVRGIARELEKDGFSIFSAVDYAEGRLVASTHHGLACMLIAAEGAGENKHLLQNMVELIRLARVRAPLLPIFALGEQVTLENAPADAMSELNQLRGILYLFEDTVPFLARQVARAARGYLDGLLPPFFKALVQHTADSNYSWHTPGHGGGVAYRKSPVGQAFHQFFGENTLRSDLSVSVPELGSLLDHTGPLAEAEARAARNFGADHTFFVINGTSTANKIVWHSMVGRDDLVLVDRNCHKSVLHSIIMTGAIPLYLCPERNELGIIGPIPLSEFSAESIQAKIDASPLTRGRPPRVKLAVVTNSTYDGLCYNAELIKQSLGNSVEVLHFDEAWYAYAAFHEFFAGRYGMGTSRSDDSPLVFSTHSTHKLLAAFSQASMIHVQDGGARQLDRDRFNEAFMMHISTSPQYSIIASLDVASAMMEGPAGRSLLQEMFDEALSFRRALANLRQNIAADDWWFSVWQPERVEGIDQVRTEDWLLEPEGEWHGFAGVTDDYVLLDPIKVTLVMPGLTAGGALSEHGIPAAVVSKFLWERGLVVEKTGLYSFLVLFSMGITKGKWSTLLTELLEFKRNYDANVSLASCLPSVAGQDPQRYQGMGLQDLCDQLHACYRSNATAKHLKRMYTVLPEVAMKPADAYDHLVRGEVEAVSIDQLQGRIAAVMLVPYPPGIPLIMPGERFTDSTRSIIDYLAFARAFDSSFPGFVADVHGLQHDDLGDGRQYTVDCIKA

SEQ ID NO: 157385 - DNA, 2229 bp, Dechloromonas aromatica RCB
  CDS (1)..(2229): transl_table=11
atgcgcttccacttccccatcatcatcatcgacgaggacttccgctcggaaaatacctcgggcttcggtatccgcgccctggccgaggcgatcgagaaggaaggcatggaagtggtcggggtgaccagttacggcgacctgacctcgtttgcccagcagcagagccgcgcctcggctttcatcctgtcgatcgacgacgaggaactggcgctggagcccgaagaaacgctggccgagctgcgcgccttcgtcaaggaaatccgcaatcgtaatgccgagattccgatcttcctgcacggcgaaacgcgcacttcgcgccacatcccgaacgacgtgctgcgcgaactgcacggcttcatccacatgttcgaggacacgccggagttcatcgcccgcaacgtcaagcgtgaggcgcaggcctacctcgattcgctgccgccgccgttcttccgggcgctgacccactacgcggccgacggttcgtattcgtggcattgccctggccactcgggcggcgttgccttccttaagtcgccggtcggccagatgttccaccagttcttcggcgagaacatgctgcgcgccgacgtctgcaatgctgtcgaggaactcggccagttgctcgaccataccggcccggtggccgcttccgagcgcaacgcagcccgtatcttcaatgccgaccatctgtatttcgtgaccaacggcacctcgacgtcgaacaagattgtctggcactcgaccgtcgcaccgggcgatgtcgtggttgttgaccgcaactgccacaagtccatcctgcacgccatcatgatgaccggggcgatccccgttttcctgatgccgacgcgtaacaatttcggcatcatcgggccgatcccgaagagcgaattcgcctgggagagcatccagaagaagatcgccgccaatcccttcatcaccgacaagaccgccaagccgcgcgtgctgacgatcacccagtcgacctacgacggcatcctctacaacgtcgaggacatcaaggacatgctcgacggcaggatcgacaccctgcatttcgacgaagcctggctgccgcacgccgccttccacgatttctacggcgattaccacgccatcggcgccgatcgtccgcgctgcaaggagtcgatgattttctcgacgcaatcgacccacaagctgctggccggcctcagccaagcctcgcagatcctggtgcaggatgccgacaactacaagctcgaccgcgacatcttcaacgaagcctatctgatgcacacctcgacctcgccgcagtattcgatcatcgcttcctgcgatgtggcggcggcgatgatggaagagccggctggtacggcgctggtcgaggagtcgattgccgaagccctcgatttccgccgcgccatgcgcaaggtggacgaagagtggggcgccgactggtggttcaaggtctgggggccggacgacctgtccgaagagggtatcgaagaacgtgaggcgtggatgctcaagccgggcgagcgctggcacggcttcaacaatctggccgacggcttcaacatgctcgacccgatcaaggcaacgatcatcaccccgggcctcgacgtcgatggcgatttcgccgacgaattcggcatcccggcggccattgtgaccaagtacctggccgagcacggcgttatcgtcgagaagtgcggcctgtacagcttcttcatcatgtttacgatcggcatcaccaagggccgctggaacacgctggtcaccgcgctgcagcagttcaaggacgattacgacaagaaccagccgctgtggaaggtattgcccgagttcgtgcagaagaatccgcgttacgagcgggttggtttgcgcgatctatgcacgcagattcacagcgtctacaaacacaatgacgtcgcccgtctgaccaccgagatgtacctgtcggacatggtcccggccatgcgtccggccgatgctttcgccaagatggcgcatcgcgatatcgagcgcgtgccagtcgatgcccttgaaggccgggttaccgcggtgctgttgacgccatatccgccgggcattccgctgctgattccgggcgaacgcttcaacaagacgatctgcagctacctgaagtttgcccgcgagttcaacgcccgcttccccggcttcgagaccgacgtgcacggtctggtcaagggcggggacggcagctactacgtcgattgcgtgcgctga

SEQ ID NO: 157386 - protein, 742 aa, Dechloromonas aromatica RCB
MRFHFPIIIIDEDFRSENTSGFGIRALAEAIEKEGMEVVGVTSYGDLTSFAQQQSRASAFILSIDDEELALEPEETLAELRAFVKEIRNRNAEIPIFLHGETRTSRHIPNDVLRELHGFIHMFEDTPEFIARNVKREAQAYLDSLPPPFFRALTHYAADGSYSWHCPGHSGGVAFLKSPVGQMFHQFFGENMLRADVCNAVEELGQLLDHTGPVAASERNAARIFNADHLYFVTNGTSTSNKIVWHSTVAPGDVVVVDRNCHKSILHAIMMTGAIPVFLMPTRNNFGIIGPIPKSEFAWESIQKKIAANPFITDKTAKPRVLTITQSTYDGILYNVEDIKDMLDGRIDTLHFDEAWLPHAAFHDFYGDYHAIGADRPRCKESMIFSTQSTHKLLAGLSQASQILVQDADNYKLDRDIFNEAYLMHTSTSPQYSIIASCDVAAAMMEEPAGTALVEESIAEALDFRRAMRKVDEEWGADWWFKVWGPDDLSEEGIEEREAWMLKPGERWHGFNNLADGFNMLDPIKATIITPGLDVDGDFADEFGIPAAIVTKYLAEHGVIVEKCGLYSFFIMFTIGITKGRWNTLVTALQQFKDDYDKNQPLWKVLPEFVQKNPRYERVGLRDLCTQIHSVYKHNDVARLTTEMYLSDMVPAMRPADAFAKMAHRDIERVPVDALEGRVTAVLLTPYPPGIPLLIPGERFNKTICSYLKFAREFNARFPGFETDVHGLVKGGDGSYYVDCVR

SEQ ID NO: 157387 - DNA, 2271 bp, Ralstonia eutropha JMP134
  CDS (1)..(2271): transl_table=11
atgaaattccgcttccccgtcatcatcattgacgaagacttccgctccgagaacatctccggctcgggtatccgcgcgctggccgaggcgatcgagaaagaggggatggaggtcatgggcctgaccagctacggcgacctgacctcgttcgcgcagcagtccagccgcgcttcgacctttatcgtgtcgatcgacgacgacgagttcgtgaccgccgatgaccagcccgaagcggccgccatcgaaaagctgcgcgcattcgtcaatgaagtgcgccgccgcaacaccgacctgccgatcttcctgtacggcgagacccgcacctcgcgccatatcccgaacgatatcctgcgcgagctgcacggcttcatccacatgttcgaggacacgcccgagttcgtggcgcgccacatcatccgcgaagccaaggtctacctcgacacgctcgcgccgccgttcttcaaggcgctgatcgactacgcgcaggattcgtcgtactcgtggcactgcccgggacactcgggcggcgtggcgttcctgaagagcccggtgggccaggtgttccaccagttcttcggcgaaaacatgctgcgtgccgatgtctgcaacgcggtggatgaactcggccagctgctggaccacaccggcccggtggccgcgtccgagcgcaacgccgcgcgtatcttcaactcggaccacatgttcttcgtgaccaacggcacgtcgacgtcgaacaagatggtgtggcacgccaacgtggcgcccggcgacatcgtcgtggtggaccgcaactgccacaagtcgatcctgcacgcgatcatgatgaccggcgcgatccccgtgttcctgatgccgacgcgcaaccactacggcatcatcggcccgatccccaagagcgagttcgacccggagaccatccgcaggaagatcgccaaccacccgttcgcaagcaaggccaagaaccagaagccgcgcatcctgacgatcacgcagggtacctacgacggcgtgctgtacaacgccgagcagatcaaggagatgctcgcgtcggaaatcgacacgctgcatttcgatgaagcgtggctgccgcacgcggcgttccacgagttctatcacaacatgcacgcgatcggccgtgaccgcccgcgcagcaaggacgcgctggtgtttgccacgcagtccacgcacaagctgctggcgggcctgtcgcaggcgtcgcagatcctcgtgcaggattccgaaacgcgcaagctggaccgctatcgcttcaacgaggcgtacctgatgcacacctcgaccagtccgcagtacgcgatcatcgcctcgtgcgatgtcgccgcggccatgatggaagcgccgggcggccccgcgctggtggaagaaagcatccaggaagcactggacttccgccgcgccatgcgcaaggtcgaaggcgacttcgaagccggcaacaatggcgactggtggttcaaggtctggggcccggatacgctgaacgacgaaggcatgcccgaacgcgagcagtggatgctcaaggccaacgagcgctggcacggcttcggcgacctggccgacggcttcaacctgctcgacccgatcaaggcgacgatcatcaccccgggcctggacgtggacggcgagttcagcgatcgcggcattccggcggccatcgtcaccaagtacctggccgagcacggcatcatcatcgagaagacgggcctgtactcgttcttcatcatgttcaccatcggcattaccaagggccgctggaattcgctggtgaccgagttgcagcagttcaaggacgactacgaccagaaccagccgctgtggcgcgtgctgcccgagttcgttggcaagcatccacagtacgaacgcatgggcctgcgtgacctgtgcgatgccgtgcacagcgtctacaaggccaacgacgtggcgcgcgtgacgacagagatgtacctgtcggacatggaaccggcgatgaagccgtcagacgcgtggtcgatgatggcgcaccgcgagatcgagcgcgtgccggtggacgacctggagggccgagtcaccgccatcctgctgacgccgtacccgccgggcatcccgctgctgatcccgggcgagcgcttcaaccgcaccatcgtccagtacctgaagttcgcgcgcgagttcaacaagctgttcccgggcttcgagaccgatgtgcacgggctggtcgaggaagaggtcgatggccgcaaggcgtacttcgtggattgcgtaaagcagggcagctaa

SEQ ID NO: 157388 - protein, 756 aa, Ralstonia eutropha JMP134
MKFRFPVIIIDEDFRSENISGSGIRALAEAIEKEGMEVMGLTSYGDLTSFAQQSSRASTFIVSIDDDEFVTADDQPEAAAIEKLRAFVNEVRRRNTDLPIFLYGETRTSRHIPNDILRELHGFIHMFEDTPEFVARHIIREAKVYLDTLAPPFFKALIDYAQDSSYSWHCPGHSGGVAFLKSPVGQVFHQFFGENMLRADVCNAVDELGQLLDHTGPVAASERNAARIFNSDHMFFVTNGTSTSNKMVWHANVAPGDIVVVDRNCHKSILHAIMMTGAIPVFLMPTRNHYGIIGPIPKSEFDPETIRRKIANHPFASKAKNQKPRILTITQGTYDGVLYNAEQIKEMLASEIDTLHFDEAWLPHAAFHEFYHNMHAIGRDRPRSKDALVFATQSTHKLLAGLSQASQILVQDSETRKLDRYRFNEAYLMHTSTSPQYAIIASCDVAAAMMEAPGGPALVEESIQEALDFRRAMRKVEGDFEAGNNGDWWFKVWGPDTLNDEGMPEREQWMLKANERWHGFGDLADGFNLLDPIKATIITPGLDVDGEFSDRGIPAAIVTKYLAEHGIIIEKTGLYSFFIMFTIGITKGRWNSLVTELQQFKDDYDQNQPLWRVLPEFVGKHPQYERMGLRDLCDAVHSVYKANDVARVTTEMYLSDMEPAMKPSDAWSMMAHREIERVPVDDLEGRVTAILLTPYPPGIPLLIPGERFNRTIVQYLKFAREFNKLFPGFETDVHGLVEEEVDGRKAYFVDCVKQGS

SEQ ID NO: 157389 - DNA, 2256 bp, Pseudomonas fluorescens PfO-1
  CDS (1)..(2256): transl_table=11
atgtacaaagatttgaagttcccggtgttgatcgtccaccgcgacatcaaggccgacacggttgccggtgaccgcatccgcggcattgcccgagagctggagctggaaggtttcagtatcgtttcggccaccgactacaccgaaggccggctcgtggcgtcgacccaccatggtctggcgtgcatgctgatcgccgcggaagacgccagcaccaactcccatctgttgcagaacatggccgaactgatcggtctggcccgggtgcgggcgccggatctgccgatctttgcactcggcgagcaagtaaccctggaaaacgccccggccgatgcgatggccgaactcaaccagttacgcggcattctctacctgttcgaagacaccgtgccgtttctcgcccgacaagtggcgcgggcagcgcgcaaatacctggacggcctgttgccgccattcttcaaggcgctggtccagcacaccgccgattccaactattcctggcacacccccggtcacggcggcggggtggcctatcacaagagtccggtggggcaggcgtttcatcagttcttcggggaaaacaccctgcgctccgatttatcggtctcggtgccggagctgggttccttgctcgatcacaccgggccgctggccgaggcggaagcgcgggccgcgcgcaatttcggcgccgatcacacctttttcgtgatcaatggcacctcgaccgccaacaagatcgtctggcactcgatggtcgggcgcgatgatctggtgctggtggatcgcaactgccacaagtcggtgctgcacgcgatcatcatgaccggcgcgattccgctgtacctgtgcccggagcgcaacgagctggggatcatcgggccgatcccgctcagtgaattcagtcgtgaatcgatccaggccaagatcgacgccagcccgttgaccaagggccgcgaaccgaaagtcaaactggcggtgatcaccaactccacttacgacggcctctgctacaacgccgagctgatcaagcagagcctgggcaacagtgtcgaagtgttgcatttcgacgaggcctggtacgcctacgccgcgtttcacgaattctttgccggccgttacggcatggccacctcgcgcagcgaggacagtccgctggtgtttaccacccactccacccacaaactgttggcggcgttcagtcaggcctcgatgattcatgttcaggacggtggggcgcggcagctggatcgcgaccggttcaacgaagcgttcatgatgcacatctcgacgtcgccgcagtacagcatcattgcttcgctggacgtcgcctcggcgatgatggaaggcccggccggacgctcgctgctgcaggaaaccttcgacgaagccctgagctttcgccgggccttggccaatctgcgtcagcacatcgccgctgacgattggtggttctcgatctggcagccgccgggtgtcgagggcatcgaccgggtgcagaccgaggactggctgctgcaacccgatgcggactggcacggtttcggcgaggtcagcgacgactacgtactgctcgacccgatcaaggtcaccctggtcatgccgggcctgaccgccggcggcgctttgagcgacaagggcatcccggcggccgtggtcagccgtttcctctgggagcgcgggctggtggtggagaaaaccggtctgtattcatttctggtgctgttctccatgggcatcaccaagggcaagtggagcacgctcctgaccgaactgctggagttcaagcgcagctacgacgccaacatcagtctcgacacctgcctgaagtgtgtcgagcaggaagatcctgtgcgctatcgcggcatgggcctgcgcgatttgtgcgatcagcttcacgcctgctatcgcagcaacgcgaccgccagacacctcaagcgcatgtacacggtgctgccggaaatcgcgatgaaaccggcccacgcttacgatcaattggtgcgcggcgaagtcgaggcggtgccgatcgatgagctggaaggccgggtggcggcggtgatgctggtgccgtacccgccgggcattccgctgatcatgcccggcgaacggtttaccgaatccacgcgctcgatcatcgaatacctcaggtttgcccgcacgttcgacacaacgtttccggggttcgtggtcgatgtgcacggtctgcaacacgaagatgagggcaatgggcggcactacaccgtcgattgcgtcaaggaatga

SEQ ID NO: 157390 - protein, 751 aa, Pseudomonas fluorescens PfO-1
MYKDLKFPVLIVHRDIKADTVAGDRIRGIARELELEGFSIVSATDYTEGRLVASTHHGLACMLIAAEDASTNSHLLQNMAELIGLARVRAPDLPIFALGEQVTLENAPADAMAELNQLRGILYLFEDTVPFLARQVARAARKYLDGLLPPFFKALVQHTADSNYSWHTPGHGGGVAYHKSPVGQAFHQFFGENTLRSDLSVSVPELGSLLDHTGPLAEAEARAARNFGADHTFFVINGTSTANKIVWHSMVGRDDLVLVDRNCHKSVLHAIIMTGAIPLYLCPERNELGIIGPIPLSEFSRESIQAKIDASPLTKGREPKVKLAVITNSTYDGLCYNAELIKQSLGNSVEVLHFDEAWYAYAAFHEFFAGRYGMATSRSEDSPLVFTTHSTHKLLAAFSQASMIHVQDGGARQLDRDRFNEAFMMHISTSPQYSIIASLDVASAMMEGPAGRSLLQETFDEALSFRRALANLRQHIAADDWWFSIWQPPGVEGIDRVQTEDWLLQPDADWHGFGEVSDDYVLLDPIKVTLVMPGLTAGGALSDKGIPAAVVSRFLWERGLVVEKTGLYSFLVLFSMGITKGKWSTLLTELLEFKRSYDANISLDTCLKCVEQEDPVRYRGMGLRDLCDQLHACYRSNATARHLKRMYTVLPEIAMKPAHAYDQLVRGEVEAVPIDELEGRVAAVMLVPYPPGIPLIMPGERFTESTRSIIEYLRFARTFDTTFPGFVVDVHGLQHEDEGNGRHYTVDCVKE

SEQ ID NO: 157391 - DNA, 2181 bp, Burkholderia sp. 383
  CDS (1)..(2181): transl_table=11
gtgagcctgttgaaaatcgcagtcgagccggcgctgattggtgccttcctcaccacgcacgaacaggtcgatgtatttcagaccgatttcacgaatatcgcggcaatcgtcgtcggaatcgattcggcgcaacaggtgcttaaaaccgtcgaaagaaccggattcgcgattccgttcttcgtcgcggtcgagcccgaccaggaagtgccgccgtcgatcctgccgagcgccagcggcgtgatccagctccgccacggcggacgccattactacggccggcagatctccgccgccgccgacatctacagcgagaacctgctgccgccgttcttcaaggtgatgcgcgaatacgtgcagcgcggttatgtcgaattcgattgccccggccaccagggcggccagttcttctcgaaccatccgctcggccggatgttcttcgacttcttcggcgagacgatctttcgcgccgacctctgcaatgccgacgtccggctcggcgacctgctgatccacgaaggcccggcgctggaagcgcagcgcaatgccgcgcggatctacaacgcggacaagacctacttcgtgctgaacggcacgtctacgtcgaacaaggtcgtcacgagcgcgctgctcgcccccgacgatctcgtgctgttcgaccgcaacaaccacaagtcggtacacctcggcgcgctcgtgctgtcgggcgcgcggccggtctacctcgaaaccgcacgcaacgcgtggggcctgatcggcggcgtcgacagcgcggcgctcgacgaagcgcgcattcgcgacgcgatccgcgacgtcgcaccggaacgcgccgaccggccgcggccgttccggctcgcggtgatccagctcggcacctacgacggcacgatctacaacgcacgcgagatcgtcgaccggatcgggcatctgtgcgactacatcctgttcgactcggcgtgggtcggctacgagcagttcatcccgatgatgcaggactgctcgccgctgatgctgacgctcggccccgacgatcccggcatcttcgtcacgcagtcggtgcacaagcagcaggccggtttctcgcagacgtcgcagatccacaagaaggacagccacatcgaaggccagaagcgcttctgcgatcaccggcgcttcaacaacgcgtacatgatccatgcgtcgacgagcccgttctacccgatgttcgcggcactcgacgtcaacgcgcagatgcacgccggcccggccggcaagcgcctgtggcgcgactgcgtggcgcacggcgtcgatgcgcgcaagctgctgctgaagacctgccgccagatccgaccgttcgttccccagaacatcgacggccgcccgtgggccgactacccgaccgagcagatcgtcgacgacctgcgcttcttccgcttccacccggccgacacgtggcacggcttcgaaggctatgcggacgaccagtatttcgtcgacccgtgcaagctgctgctgacgacgcccggcatcgatcgcgacacgcacgaatacgcggcgttcggcgcgccggcgccgatcctggcgcgctacctgcgcgagcacggcgtcgtgcccgagaaggccgacctgtacacgatcctgttcctgctcacgccgtcggagagcttcggcaagctgcagcatctgatcgcgcacctcgcgcagttcgagcgccatctcgaccaggacacaccgctgcgcgaagccattccgtcactgtgcgaagcgtatccggagctgtacggcaacatgcgcctgcggcagctgtgccagcggatgcacgacttctaccgcagccacgacatgaagcatctgcagaagctgatgttccggcgcgcgcagttcccgaaacaggcgatgctgccgcaggccgccaacgccgagctgattcgcaacaacgtcgagctcgtcacgctcgatcgcatcgaaggccggatcgcgacggaaggcgcgctgccctatccgcccggcatcttctgcgtggtgcccggcgaagcatggggcggcccggcgctcgactacttccgcgcgctcgaagccgggatcaacgcactgccgggtttcgagccggaaatccagggcgtctatctgcaaacgctgccggacggcacgaagcaggcttccgcttacgtcgtggcaaccggcaccgacgcgtcacgcgcgtaa

SEQ ID NO: 157392 - protein, 726 aa, Burkholderia sp. 383
MSLLKIAVEPALIGAFLTTHEQVDVFQTDFTNIAAIVVGIDSAQQVLKTVERTGFAIPFFVAVEPDQEVPPSILPSASGVIQLRHGGRHYYGRQISAAADIYSENLLPPFFKVMREYVQRGYVEFDCPGHQGGQFFSNHPLGRMFFDFFGETIFRADLCNADVRLGDLLIHEGPALEAQRNAARIYNADKTYFVLNGTSTSNKVVTSALLAPDDLVLFDRNNHKSVHLGALVLSGARPVYLETARNAWGLIGGVDSAALDEARIRDAIRDVAPERADRPRPFRLAVIQLGTYDGTIYNAREIVDRIGHLCDYILFDSAWVGYEQFIPMMQDCSPLMLTLGPDDPGIFVTQSVHKQQAGFSQTSQIHKKDSHIEGQKRFCDHRRFNNAYMIHASTSPFYPMFAALDVNAQMHAGPAGKRLWRDCVAHGVDARKLLLKTCRQIRPFVPQNIDGRPWADYPTEQIVDDLRFFRFHPADTWHGFEGYADDQYFVDPCKLLLTTPGIDRDTHEYAAFGAPAPILARYLREHGVVPEKADLYTILFLLTPSESFGKLQHLIAHLAQFERHLDQDTPLREAIPSLCEAYPELYGNMRLRQLCQRMHDFYRSHDMKHLQKLMFRRAQFPKQAMLPQAANAELIRNNVELVTLDRIEGRIATEGALPYPPGIFCVVPGEAWGGPALDYFRALEAGINALPGFEPEIQGVYLQTLPDGTKQASAYVVATGTDASRA

SEQ ID NO: 157393 - DNA, 2280 bp, Burkholderia thailandensis E264
  CDS (1)..(2280): transl_table=11
atgaagtttcgttttcccgtcgtcatcatcgacgaagattttcgctccgagaacatttcgggctccggcatccgggcgctggccgaggcgatcgagaaggaaggcgtcgaggtgctcggtctgacgagttacggcgatctgacctcgttcgcgcagcagtcgagccgcgcgtcgtgcttcatcctgtcgatcgacgacgacgagctgatgctcggcgagctcggcgcggacggcgagctgcccgagctcgcgaccgcgatcatcgagctgcgcgcgttcgtgaccgaagtgcgccgccgcaacgcggacatcccgatcttcctgtacggtgagacgcgcacgtcgcgccacctgccgaacgacatcctgcgcgaactgcacggcttcatccacatgttcgaggacacgccggagttcgtcgcgcgccacatcatccgggaggcgaaggtctatctcgattcgctcgcgccgccgttcttcaaggagctcgtcaagtacgcggacgagggctcgtactcgtggcactgcccgggccactcgggcggcgtcgcgttcctgaagaatccgctcggccagatgttccaccagttcttcggcgagaacatgctgcgcgcggacgtgtgcaacgcggtcgacgagctcggccaactgctcgaccacacgggccccgtggccgcgtccgagcgcaacgccgcgcggatcttcagcgccgatcacctgttcttcgtgaccaacggcacgtcgacgtcgaacaagatcgtctggcacgcgacggtcgcgccaggcgacatcgtgctcgtcgatcgcaactgtcacaagtcgatcctgcacgcgatcacgatgacgcacgcgattcccgtgttcctcacgccgacgcgcaaccacttcggcatcatcgggccgattccgcgcgacgagttcaagccggagaacatccgcaagaagatcgaggcgaatccgttcgcgcgcgaggcgctcgcgaaaaacccgaacgcgaagccgcggattctcacgatcacgcagagcacgtacgacggcgtcgtctacaacgtcgagcagatcaaggacctgctcggcgatctcgtcgacacgctgcacttcgacgaagcgtggctgccgcacgcggaattccacccgttctaccaggacatgcacgcgatcggcgcgggccgcccgcgcaccggcgcgctcgtgttcgcgacgcactcgacgcacaagctgctcgcgggcatctcgcaggcgtcgcagatcgtcgtgcaggattcggagaaccgcacgttcgacaagcaccgcttcaacgaggcgtacctgatgcatacgtcgaccagcccgcagtacgcgatcatcgcgtcgtgcgacgtcgcggccgcgatgatggagccgccgggcggcaccgcgctcgtcgaggaatcgatcgccgaggcgatcgacttccgccgcgcgatgcgcaaggtcgacgccgagtacggcgacgactggttcttcagcgtgtggggcccggacaatctgtcggaagaggggatcggctcgcgcgccgactggctgctcaagccgaacgaccgctggcacggcttcggcccgctcgcgcaaggcttcaacatgctcgacccgatcaaggcgacgatcatcacgccggggctcgacgtggacggcgaattcggcgagaccggcattccggccgcgatcgtcacgaagtatctggccgagcacgggatcatcgtcgagaagacgggcctgtactcgttcttcatcatgttcacgatcggcatcacgaagggccgctggaactcgatggtcaccgagctgcagcagttcaaggacgactacgacaacaaccagccgctctggcgcgtgctgcccgagttcgtcgcgcagtatccgctctacgagcgcgtcggcctgcgcgatctctgcacgcagatccacgacgtgtaccgcgcgaacgacatcgcgcggctcacgaccgagatgtacctgtcgaacatggagccggcgatgaagccgtccgatgcgttcgcgaagctggcgcaccgcgaggtcgaccgcgtgccgctcgacgagctcgaaggccgcgtgaccagcatcctgctcacgccgtatccgccgggcattccgcttttgatcccgggcgagcgcttcaacaagacgatcgtcaactacctgcggttcgcgcgcgacttcaacgagcgcttcccgggcttccacaccgacatccacggtctcgtcgcggaagagatgaacgggcgcatcgagtattacgtcgactgcgtgcgcgactga

SEQ ID NO: 157394 - protein, 759 aa, Burkholderia thailandensis E264
MKFRFPVVIIDEDFRSENISGSGIRALAEAIEKEGVEVLGLTSYGDLTSFAQQSSRASCFILSIDDDELMLGELGADGELPELATAIIELRAFVTEVRRRNADIPIFLYGETRTSRHLPNDILRELHGFIHMFEDTPEFVARHIIREAKVYLDSLAPPFFKELVKYADEGSYSWHCPGHSGGVAFLKNPLGQMFHQFFGENMLRADVCNAVDELGQLLDHTGPVAASERNAARIFSADHLFFVTNGTSTSNKIVWHATVAPGDIVLVDRNCHKSILHAITMTHAIPVFLTPTRNHFGIIGPIPRDEFKPENIRKKIEANPFAREALAKNPNAKPRILTITQSTYDGVVYNVEQIKDLLGDLVDTLHFDEAWLPHAEFHPFYQDMHAIGAGRPRTGALVFATHSTHKLLAGISQASQIVVQDSENRTFDKHRFNEAYLMHTSTSPQYAIIASCDVAAAMMEPPGGTALVEESIAEAIDFRRAMRKVDAEYGDDWFFSVWGPDNLSEEGIGSRADWLLKPNDRWHGFGPLAQGFNMLDPIKATIITPGLDVDGEFGETGIPAAIVTKYLAEHGIIVEKTGLYSFFIMFTIGITKGRWNSMVTELQQFKDDYDNNQPLWRVLPEFVAQYPLYERVGLRDLCTQIHDVYRANDIARLTTEMYLSNMEPAMKPSDAFAKLAHREVDRVPLDELEGRVTSILLTPYPPGIPLLIPGERFNKTIVNYLRFARDFNERFPGFHTDIHGLVAEEMNGRIEYYVDCVRD

SEQ ID NO: 157395 - DNA, 2274 bp, Saccharophagus degradans 2-40
  CDS (1)..(2274): transl_table=11
atgataggaacaaaagatatgaaatttcgttttcccattgtcgtcatcgatgaagattttagggccgaaaatatctctggctcgagtattcgcgatctagccgaagcaattggtaacgaagggatggaagttgtaggctttaccagctatgtagacctcacctcctttgctcagcaagcaagccgtgcatcgtgttttattgtttctatcgacgacgatgagttcggctcgggttcacccgaagaagtggccgtacctattgaggcgttgcgaagctttatattagcggttagaaagcgcaataccgatattcctatcttcctatacggtgaaacccgcactgcgcagcatatccccaatgatgtattgcgcgagctacacggctttattcacatgtttgaagacacgcccgagtttgtggcgcgccatattatccgtgaggcgaaaaagtatttgtcgtcactcgcgccaccattttttaatgcccttatggagtacgcaagcgatagctcatactcgtggcattgccctgggcactctggtggcgtagcgtttttaaaaagccccattggccaaatgttccaccagttttttggcgagaacatgctgcgcgcagacgtgtgcaactcggtagatgagctaggtcagctgctggatcacaccggcccagttgccgcgagcgagcaaaatgccgcccgtatatttaacagtgaccatttgttttttgtgactaacggtacttctacatccaacaaaatcgtgtggcactccaccgtagcgcctggcgacattgtggtagtagatagaaactgccacaaatcgattttgcactccattattatgaccggcgccatccctgtgtttttaatgcctacgcgcaaccactacggcattattggtcctattccaaagtctgaatttactatggaatctatccgcgaaaagatagaagccaacccgtttgcgcgtaaagccaaaaacaaaaagccccgtatcctcactattacgcaaagtacctacgacggtattttgtataacgtggagcaaatcaaagagattcttggctccaatatcgacacattgcatttcgacgaagcttggttgccccatgctacgttccacgacttttataaaaacatgcacgccataggcacagaccggccgcgttcggacgacaccttagtattcgccacacaatctacccataaactgcttgctggcttatcgcaggcgtcgcaaatattggtgcaaaacggcaacaaccgtaaattggacactcaccgttttaacgaatcctacttaatgcattcttccaccagcccgcaatattccattattgcctcgtgcgatgtggctgcagccatgatggaggcccccggcggtaccgcgctagtagaagaatcgctgctagaagcgctcgatttccgccgtgccatgcgcaaagtagatgcagagtttggtgatgatgactggtggttccaagtttgggggcctaaggatattgccgaagagggcattggcgagcgcgaagattgggttatacgcgaagatgatgactggcacgatttcggcaatattgaatctggctttaatatgctcgaccccatcaaagccactatcatcacccccgggctaaacttgaagggcgacttcgatgagtttggtattccggctgcaattgtaagtaaatacttggctgagcacggcattatcatcgaaaaaaccggcctgtattccttcttcattatgttcactatcggcattaccaaaggccgatggaattccatggtgacggaattgcagcaatttaaagacgattacgaccaaaacctgcctttatggcgtgttttaccggagttcgtgagtaaacacaaacagtatgagcgcattggtttgcgcgatttgtgtacccaaattcacgatatgtataaaaagtacgacgtggctaaaattaccactgatatgtacctatctaaaatagagcctgctatgaccccagcagatgcttgggcaaaaatggctcaccgcgaaatagagcgcgtatctattgatgaaatagaaggccgtattactgcgatgttagtaaccccttacccaccgggtatacctttgatggtgccgggcgagcgattcaacagcactattattagctacttgaagttcgcgcgcgatttcaactctgcgttaccgggctttgagacagacgtacacggtctagtgaaagacaccgtaaacggggtagaaggctactatatcgatgtagttaaagagtaa

SEQ ID NO: 157396 - protein, 757 aa, Saccharophagus degradans 2-40
MIGTKDMKFRFPIVVIDEDFRAENISGSSIRDLAEAIGNEGMEVVGFTSYVDLTSFAQQASRASCFIVSIDDDEFGSGSPEEVAVPIEALRSFILAVRKRNTDIPIFLYGETRTAQHIPNDVLRELHGFIHMFEDTPEFVARHIIREAKKYLSSLAPPFFNALMEYASDSSYSWHCPGHSGGVAFLKSPIGQMFHQFFGENMLRADVCNSVDELGQLLDHTGPVAASEQNAARIFNSDHLFFVTNGTSTSNKIVWHSTVAPGDIVVVDRNCHKSILHSIIMTGAIPVFLMPTRNHYGIIGPIPKSEFTMESIREKIEANPFARKAKNKKPRILTITQSTYDGILYNVEQIKEILGSNIDTLHFDEAWLPHATFHDFYKNMHAIGTDRPRSDDTLVFATQSTHKLLAGLSQASQILVQNGNNRKLDTHRFNESYLMHSSTSPQYSIIASCDVAAAMMEAPGGTALVEESLLEALDFRRAMRKVDAEFGDDDWWFQVWGPKDIAEEGIGEREDWVIREDDDWHDFGNIESGFNMLDPIKATIITPGLNLKGDFDEFGIPAAIVSKYLAEHGIIIEKTGLYSFFIMFTIGITKGRWNSMVTELQQFKDDYDQNLPLWRVLPEFVSKHKQYERIGLRDLCTQIHDMYKKYDVAKITTDMYLSKIEPAMTPADAWAKMAHREIERVSIDEIEGRITAMLVTPYPPGIPLMVPGERFNSTIISYLKFARDFNSALPGFETDVHGLVKDTVNGVEGYYIDVVKE

SEQ ID NO: 157397 - DNA, 2337 bp, Burkholderia xenovorans LB400
  CDS (1)..(2337): transl_table=11
atgttatacgaccagatgtttggtttcctgttctgttgcgcgatgccattgccgccaacacttccctcgtcgaggctgcaacgcatcgtcgacgaactcggccggctaggctacggcacaacgattacagccgagaccgcggaggccagctccgcgattcgcagcgacgcatcggtgggttgtatcgtcgtcgaatggtcgctaaccgaaccggagaacgaggtcgaagcgtttgtacggttcgtgcgcgagcgtggcctagacgttccggtgttcattctggtggagcgccacctgctccaggaaattccggtggcggtgctgggtcatgtgacgggttatatattcatcgaggaagacacgccggaattcgtcgcccgcaatctggtgagtcatctgcacagctatgccgattcgttaaagacacctttcttcggtgccatggtcgactacgcggagcaggccaaccagatgtggacctgcccaggtcacaacggcggggtgttctaccagaagagcccgattggtcgcgcgttcgtcaagcatttaggcgaggccgtattccgcaatgacctggataattcagtcatcgaactgggcgatctgctcgtgcacgaaggcccggcactggccgcacaaaaggccgccgcgcggatcttcggcgcggagcggacgtatttcgtgctcaacggcacgtcaacctcgaacaagatcgccttgaccgcgctggttgcgccgggcgacctcgtgctgttcgaccgcaataaccacaaggcggctcatcatggcgcgctgctgctcggcggcggcctaccggtttatcttcccaccgtgcgcaatgtgcacgggatgatcggcccgattgatttcgagacgctcgacgagacgcgcattcgtgacagcatccggcgcaaccccctgatcaaggacccgcaagcctggcagcggaagcggccgttccgggttgcgatcatcgagcaatgcacctacgacggcacgatctacgacgtgcagatgctcgtcgaaaagctcggtccgctgtgcgagtacatcatgttcgacgaagcatgggccggcttcatgaaattccatccactgttcaagggacacttcgcgatgggtctcgaagctctgggagcggatgcacctggcattatcgcagcacagtcgacgcacaagcagctggcgggtttttcgcaggcctcccagatccatgtgaaggatgcgcatctcgatgggcaacgcaggcaggtcagtcaccggcgtttcaacgagatgttcatgcagcattcgtcgacctcaccgttctatccgctgttcgcctcgcttgatgtcggcgcgcaaatgatgcgtggccgctccggagaggttttgtgggatgacacgatcaagctcggtatcgagatgcgcaagaagatccgcgccttgcgtcgcgaatatgaagcgacggaaacggacgtggcgcgacaatggttttttgatccgttcgtaccggatgtggtccagggacaagacaggattgaacgctgggaggacattccgaccgacgaactcgccgccagcacgcgttactgggaactggctcccgggcagaaatggcatggctatggggcactcgccccgggctacgtgatgaccgaccccaacaagctgacgctgctgacaccgggctttaaccgcgagacgggtgaatacgcggagcatggcattccggcggcggtactggccgagtttcttcgggaagtgcggatcgtcccggagaagaatgacctgaacagcatccttttcctgctgacgccggggctcgaatcgtcgaaggccggcacactgctgtcggcactggttcgcttcaagcagttacacgacgacaacgcgttgctcgaggacgtcattccctcatttgtggcagcgcatcgtgcgcgctatgcaggcgtcggcttgcggcggttgtgtgcgcagatgcatgacttttatcgggagcgaaacgtcagccgccttcagcgggaacagtttcgcgcggcgcattttcctgaagcagcgatgcccccgcagcaagcgatgcatgaactcgtgcgcaacaacgtcgagttgttgccgatcgatcagatccgcggccgcatcgcggccaccctcgcattggtctatccacccggcatcggggtcatcgtacccggtgaaagatatgacgagcgggcgttgccgatgctggattatttccgcatgttcgaggacggcggcaaccgttttccgggttttgaaaacgagattcagggcatttatcggaagaccgaaagcgatggaagcatgcgactctacacctacgtcgtgaccgaataa

SEQ ID NO: 157398 - protein, 778 aa, Burkholderia xenovorans LB400
MLYDQMFGFLFCCAMPLPPTLPSSRLQRIVDELGRLGYGTTITAETAEASSAIRSDASVGCIVVEWSLTEPENEVEAFVRFVRERGLDVPVFILVERHLLQEIPVAVLGHVTGYIFIEEDTPEFVARNLVSHLHSYADSLKTPFFGAMVDYAEQANQMWTCPGHNGGVFYQKSPIGRAFVKHLGEAVFRNDLDNSVIELGDLLVHEGPALAAQKAAARIFGAERTYFVLNGTSTSNKIALTALVAPGDLVLFDRNNHKAAHHGALLLGGGLPVYLPTVRNVHGMIGPIDFETLDETRIRDSIRRNPLIKDPQAWQRKRPFRVAIIEQCTYDGTIYDVQMLVEKLGPLCEYIMFDEAWAGFMKFHPLFKGHFAMGLEALGADAPGIIAAQSTHKQLAGFSQASQIHVKDAHLDGQRRQVSHRRFNEMFMQHSSTSPFYPLFASLDVGAQMMRGRSGEVLWDDTIKLGIEMRKKIRALRREYEATETDVARQWFFDPFVPDVVQGQDRIERWEDIPTDELAASTRYWELAPGQKWHGYGALAPGYVMTDPNKLTLLTPGFNRETGEYAEHGIPAAVLAEFLREVRIVPEKNDLNSILFLLTPGLESSKAGTLLSALVRFKQLHDDNALLEDVIPSFVAAHRARYAGVGLRRLCAQMHDFYRERNVSRLQREQFRAAHFPEAAMPPQQAMHELVRNNVELLPIDQIRGRIAATLALVYPPGIGVIVPGERYDERALPMLDYFRMFEDGGNRFPGFENEIQGIYRKTESDGSMRLYTYVVTE

SEQ ID NO: 157399 - DNA, 2286 bp, Burkholderia xenovorans LB400
  CDS (1)..(2286): transl_table=11
atgaagtttcgttttcccgtcgtcatcatcgacgaagatttccgctccgagaacatctcgggttccggcatccgggctctggccgaagccatcgagaaagaaggcgcggaagtgctcgggttgacgagctacggcgatctgacttcgttcgcgcagcagtcgagccgcgcctcgtgcttcatcctttcgatcgacgatgacgagctgctgccgtacgtcgataacgtggtggtggaaggcgagacgccggaactggccgccgcgatcgtcgcgctgcgcgcgttcgtgaccgaagtgcgccgccgcaacgccgacattccgatcttcctgtacggcgaaacgcgcacctcgcgccacctgccgaacgacatcctgcgcgaactgcacggcttcatccacatgttcgaggacacgccggagttcgtcgcgcgccatatcatccgcgagaccaaggtgtatctggattcgctcgcaccgccgttcttcaaggaactggtgcagtacgcggaagaaggctcgtactcgtggcactgtccgggccactcgggcggcgtcgcgttcctgaagagcccgctcggccagatgttccaccagttcttcggcgagaacatgctgcgcgcggacgtgtgcaatgccgtcgacgaacttggccagttgctggaccacacgggccctgtcgcggcttccgaacgcaatgcggcgcgcatcttcagcgcggaccacgtgttcttcgtgaccaacggcacgtccacgtcgaacaagatcgtctggcacggcacggtagcgccgggcgacatcgtgctggtggaccgcaactgccacaagtcgatcctgcacgcgatcaccatgaccggcgcgattccggtgttcctcacgccgacgcgcaacaacttcggcatcatcgggccgattccgcgcagcgagttcgagccggaaaacatcaagaagaagatcctcgcgaacccgttcgcgcgcgaagcgctcgctaagaatccggacctcaagccgcgcatcctgaccatcacgcaaagcacgtacgacggcgtaatctacaacgtcgagatgatcaaggaaatgctcggcgactggctcgacacgctgcacttcgacgaagcctggctgccgcacgctgaattccacgagttctatcaggacatgcacgcaatcggcgcgggccgtccgcgtattggtgcgatggtgttcgccacgcactccacgcacaagctgctggccggcatttcgcaggcttcgcagatcgtcgtgcaggattcgaagaacagccgcttcgacaagcatcgtttcaatgaagcgtatctgatgcacacgtcgaccagcccgcagtacgcgatcatcgcctcgtgcgacgtggccgcggccatgatggaagcgccgggcggcaccgcgctcgtcgaagagtcgatcgcggaggcgttggacttccgccgcgcaatgagcaaggtcgacgccgaatacggcgacgactggttcttcaaggtgtggggcccagaccagttcgccgaagaaggcatcggctcgcgcgaagactggatgctgcgtccgaacgatccgtggcacggtttcggaccgctcgccgacggcttcaacatgctcgacccgatcaaggcgaccatcgttacgccgggtctggatatggacggcggcttcggcgagtcgggcattccggccgcgatcgtcacgaagtatctggccgagcacggcatcatcgtcgagaagaccgggctgtattcgttcttcatcatgttcacgatcggcatcaccaagggccgctggaattcgatggtcaccgaactgcagcagttcaaggacgactacgacaacaaccagccgctgtggcgcgtgctgcccgagttcgtctcgcatcatcccatgtacgaacgtgtgggtttgcgcgatctgtgcgagcagattcacagcgtctaccgcgcgaacgacattgcgcgcctgacgaccgagatgtacctgtcgagcatggaaccggccatgaagccgtccgatgcgttcgccaagctcgcgcaccgcgagatcgaccgcgtgcctatcgacgaactggaaggccgcgtcacgtcgatcctgctgacgccgtatccgccgggcattccgctgctgatcccgggcgagcgcttcaacaggaccatcgtcaactatctgcgtttcgcgcgcgagttcaacgagcgcttcccgggtttccacacggacatccacgggctggtcggcgaaacgatcaacggacgcatcgaatacttcgtcgattgcgttcgcgcctga

SEQ ID NO: 157400 - protein, 761 aa, Burkholderia xenovorans LB400
MKFRFPVVIIDEDFRSENISGSGIRALAEAIEKEGAEVLGLTSYGDLTSFAQQSSRASCFILSIDDDELLPYVDNVVVEGETPELAAAIVALRAFVTEVRRRNADIPIFLYGETRTSRHLPNDILRELHGFIHMFEDTPEFVARHIIRETKVYLDSLAPPFFKELVQYAEEGSYSWHCPGHSGGVAFLKSPLGQMFHQFFGENMLRADVCNAVDELGQLLDHTGPVAASERNAARIFSADHVFFVTNGTSTSNKIVWHGTVAPGDIVLVDRNCHKSILHAITMTGAIPVFLTPTRNNFGIIGPIPRSEFEPENIKKKILANPFAREALAKNPDLKPRILTITQSTYDGVIYNVEMIKEMLGDWLDTLHFDEAWLPHAEFHEFYQDMHAIGAGRPRIGAMVFATHSTHKLLAGISQASQIVVQDSKNSRFDKHRFNEAYLMHTSTSPQYAIIASCDVAAAMMEAPGGTALVEESIAEALDFRRAMSKVDAEYGDDWFFKVWGPDQFAEEGIGSREDWMLRPNDPWHGFGPLADGFNMLDPIKATIVTPGLDMDGGFGESGIPAAIVTKYLAEHGIIVEKTGLYSFFIMFTIGITKGRWNSMVTELQQFKDDYDNNQPLWRVLPEFVSHHPMYERVGLRDLCEQIHSVYRANDIARLTTEMYLSSMEPAMKPSDAFAKLAHREIDRVPIDELEGRVTSILLTPYPPGIPLLIPGERFNRTIVNYLRFAREFNERFPGFHTDIHGLVGETINGRIEYFVDCVRA

SEQ ID NO: 157401 - DNA, 2265 bp, Ralstonia metallidurans CH34
  CDS (1)..(2265): transl_table=11
atgaaattccgcttccccgtcatcatcatcgatgaagacttccgctccgagaacatctccggctcgggcattcgcgcgttggccgaggccatcgagaatgaaggcatggaagtgatgggtctgaccagctatggcgacttgacgtcgttcgcccagcagtccagccgggcatccacgttcatcgtgtcgatcgacgacgacgagttcgtgcgcgccgacgatcagcccgaagcggccgccatcgagaagctgcgcgcgttcgtgaccgaagtgcgtcgccgcaacacggatctgccgatcttcctgtatggcgagacgcgcacgtcgcgccatattccgaacgacatcctgcgcgagctgcacggcttcatccacatgttcgaggacacccccgaattcgtggcgcgccacatcatccgcgaagccaaggtctacctggattcgctggccccgccgttcttcaaggcgctgatcgactacgcgcaggacagctcgtactcgtggcactgcccggggcactcgggcggcgtggcgttcctgaagagcccggtgggccaggtgttccaccagttcttcggcgagaacatgctgcgcgccgacgtctgcaacgcggtcgaggaacttggccagctgctggaccacaccggcccggtggcggcgtcggagcgcaacgccgcgcgcatcttcaattccgaccacatgttcttcgtgaccaacggcacgtcgacgtcgaacaagatggtctggcacgccaacgtggcgccgggcgacatcgtggtggtggaccgtaactgccacaagtcgatcctgcacgcgatcatgatgacgggcgcaattccggtgttcctgatgccgacgcgcaaccactacggcatcatcggcccgattccgaagagcgagttcgacccggagacgatccgcaggaagatcgagaaccatccgttcgcgagcaaggcgaagaaccagaagccgcgcatcctgacgatcacgcagggtacgtacgacggcgtgctgtacaacgccgagcagatcaaggaaatgctgacgtcggaaatcgacacgctgcatttcgacgaggcatggctgccgcacgcggcgttccacgatttctatcgcgacatgcacgcgatcggccgtgaccgtccgcgcagcaaggacgcgctggtgttcgccacgcagtccacgcacaagctgctggccggcctgtcgcaggcctcgcagatcctcgtgcaggattcggaaacgcgcaagctggatcgctaccgcttcaacgaggcgtatctgatgcacacctcgacgagcccgcagtactcgatcattgcctcgtgcgacgtggccgcggcgatgatggaagcgccgggcggcaccgcgctggtcgaggaaagcatccaggaagcgctggacttccgccgtgccgtgcgcaaggtggaagccgactacgacgtcgccaacaatggcgactggtggttcaaggtgtggggcccggacgcgctggccgaagacggcattcctgaccgcgaagagtggatgctcaaggccaacgagcgctggcatggcttcggcgatctggccgatggtttcaacctgctggatccgatcaaggccacgatcatcaccccgggcctcgacgtggacggcgagttcagcgagcgcggcatcccggcggcaatcgtcacgaagtacctggccgagcacggcatcatcatcgagaagacgggtctgtactcgttcttcatcatgttcacgatcggcatcaccaagggccgctggaactcgctggtgaccgagctgcagcagttcaaggacgactacgaccagaaccagccgctgtggcgcgtgctgcccgagttcgtgggcaagcacccgcagtacgagcggctgggcctgcgtgatctgtgcgacgcgatccacagcgtctacaaggccaacgatgtggcgcgcgtgaccaccgagatgtacctgtcggacatggagccggcgatgaagccgtcggatgcctgggcgatgatggcgcatcgcgaaatcgagcgcgtgcccgtcgacgaactggaaggccgcgtgaccgcgatcctgctgacgccgtacccgccgggcattccgctgctgatcccgggcgagcgcttcaaccgcacgatcgtgaagtacctgaagttcgcgcgcgagttcaacaagctcttcccgggcttcgagaccgacatccacggcctggtcgaggacgaggtcgatggccagaaggcgtacttcgtggattgcgtgaagcagtaa

SEQ ID NO: 157402 - protein, 754 aa, Ralstonia metallidurans CH34
MKFRFPVIIIDEDFRSENISGSGIRALAEAIENEGMEVMGLTSYGDLTSFAQQSSRASTFIVSIDDDEFVRADDQPEAAAIEKLRAFVTEVRRRNTDLPIFLYGETRTSRHIPNDILRELHGFIHMFEDTPEFVARHIIREAKVYLDSLAPPFFKALIDYAQDSSYSWHCPGHSGGVAFLKSPVGQVFHQFFGENMLRADVCNAVEELGQLLDHTGPVAASERNAARIFNSDHMFFVTNGTSTSNKMVWHANVAPGDIVVVDRNCHKSILHAIMMTGAIPVFLMPTRNHYGIIGPIPKSEFDPETIRRKIENHPFASKAKNQKPRILTITQGTYDGVLYNAEQIKEMLTSEIDTLHFDEAWLPHAAFHDFYRDMHAIGRDRPRSKDALVFATQSTHKLLAGLSQASQILVQDSETRKLDRYRFNEAYLMHTSTSPQYSIIASCDVAAAMMEAPGGTALVEESIQEALDFRRAVRKVEADYDVANNGDWWFKVWGPDALAEDGIPDREEWMLKANERWHGFGDLADGFNLLDPIKATIITPGLDVDGEFSERGIPAAIVTKYLAEHGIIIEKTGLYSFFIMFTIGITKGRWNSLVTELQQFKDDYDQNQPLWRVLPEFVGKHPQYERLGLRDLCDAIHSVYKANDVARVTTEMYLSDMEPAMKPSDAWAMMAHREIERVPVDELEGRVTAILLTPYPPGIPLLIPGERFNRTIVKYLKFAREFNKLFPGFETDIHGLVEDEVDGQKAYFVDCVKQ

SEQ ID NO: 157403 - DNA, 2160 bp, Haemophilus somnus 129PT
  CDS (1)..(2160): transl_table=11
atgttaaaattaaaaatcgcacatagcccattagtgcaaaaatattttacatcaactcgtgaattagttttattaaatcaaactgatttcaccgatataggtgcaataatattgactgccgaagatgttaagtatattcaacaaataaaaacgactgaatttaatattcctatttttgtcgtattaaatgaaggtgaaacactttctgatgaatattttgatcaggtttatcatgttcaagatctaaacagctatgatatcaatttgtatagccgtcaaattgaaacagctgcgtctctttatgagcaaaaaatgttacctccattctttaaaatgttaagcgaatatgtcgaaatgggtaatttggcatttgattgtccgggacaccaaggcggtcaatatttccgcaaacatccagccggccgttatctatacgatttctatggagaaaatattttccgttcagatatttgtaatgctgatgtgaaattgggagatttactaatacatgagggtgctccatgtgatgctcaacaacatgcggcaaaagtatataatgcagataaaacatattttgtgctaaacggaacttccgcctccaataaagtggtttgtaacgcactacttgcaccgggtgatctagtattatttgaccgcaacaatcacaaatcaaatcaccacggtgctttaattcaagcgggtgcaacccctgtttacttggaaactgcccgtaatccattcggcttcatcggcggtattgataaccactgttttgaagaagcatatcttaaaaaattaatcgcagaagtggcaccggaaaaacttgaagagaaacgtcctttccgtcttgcaattattcaattgggtacttatgacggaacaatttataacgccaaacaagttgttgaacgtattggacatttatgcgattacatcttgttcgattctgcatgggtcggctatgaacaattcattccaatgatgaaagattgctctccattattactagatttaaatgaaaatgaccctggtattatcgtgacacaatcggtacataaacaacaagcaggtttctcacaaacatcacaaattcataaaaaagacaaacatattaaaggacaagcaagatattgcaatcacaaacgctttaataatgcctttatgttgcatgcgtctaccagcccattctatcctctattcgccactctggatgtaaacgctcaaattcaaggttctcctgcagggaaacgtctatgggccgagtgtgtagaagttggtatcgaggcaagaaagttaatgcttaagcactgcactttaatcaaaccatttattcctccttatgtgaaaggtaaaaaatggcaagatcacgatactaaagaaattgcaaatgatcttgagtttttcaatttccatgcaaatgatacatggcataaatttgagggttatacagataatcaatattttgttgacccttgtaaattcatgctcacaactccggggattaacattgaaacaggggaatatgaagactttggtattccagcaacaatccttgctaacttcttgcgagaaaatggaatcattcctgaaaaatgtgacttgaactccattttattcttgcttacaccggctgaaacattgacaaaaatgcaaactttagttgctcaaatagctgcgtttgaaaaacatatcaaacaaaattcattactcaaagatgtactgcctactgtgtacaaaaataatgaggaacgctatcagggctacactatcagacaattatgtcaagaaatgcacaatctttacgtcagtagaaatgttaaacagctacaacgtgacttgtttagaaaaacaactctaccggaatatgctatgaacccacaaaaagcgaatatcgaatttgttcgtaacaaaattgaattagttccattgacagatattgtggggagaatcgccgccgaaggtgcattaccttaccctccaggtgttttatgtgttgttcccggtgaacgttggagtacgacagtacaacaatatttccttgcactggaagaaggcattaatgttcttcctggattcgcaccggaaattcagggcgtatatctacaaaaagatcctgatggacgtacacgtgcttatggatatgtattaactgaagcataa

SEQ ID NO: 157404 - protein, 719 aa, Haemophilus somnus 129PT
MLKLKIAHSPLVQKYFTSTRELVLLNQTDFTDIGAIILTAEDVKYIQQIKTTEFNIPIFVVLNEGETLSDEYFDQVYHVQDLNSYDINLYSRQIETAASLYEQKMLPPFFKMLSEYVEMGNLAFDCPGHQGGQYFRKHPAGRYLYDFYGENIFRSDICNADVKLGDLLIHEGAPCDAQQHAAKVYNADKTYFVLNGTSASNKVVCNALLAPGDLVLFDRNNHKSNHHGALIQAGATPVYLETARNPFGFIGGIDNHCFEEAYLKKLIAEVAPEKLEEKRPFRLAIIQLGTYDGTIYNAKQVVERIGHLCDYILFDSAWVGYEQFIPMMKDCSPLLLDLNENDPGIIVTQSVHKQQAGFSQTSQIHKKDKHIKGQARYCNHKRFNNAFMLHASTSPFYPLFATLDVNAQIQGSPAGKRLWAECVEVGIEARKLMLKHCTLIKPFIPPYVKGKKWQDHDTKEIANDLEFFNFHANDTWHKFEGYTDNQYFVDPCKFMLTTPGINIETGEYEDFGIPATILANFLRENGIIPEKCDLNSILFLLTPAETLTKMQTLVAQIAAFEKHIKQNSLLKDVLPTVYKNNEERYQGYTIRQLCQEMHNLYVSRNVKQLQRDLFRKTTLPEYAMNPQKANIEFVRNKIELVPLTDIVGRIAAEGALPYPPGVLCVVPGERWSTTVQQYFLALEEGINVLPGFAPEIQGVYLQKDPDGRTRAYGYVLTEA

SEQ ID NO: 157405 - DNA, 2256 bp, Pseudomonas aeruginosa UCBPP-PA14
  CDS (1)..(2256): transl_table=11
atgtataaagacctcaaatttcccgtcctcatcgtccatcgcgacatcaaggccgacaccgttgccggcgaacgcgtgcggggcatcgcccacgaactggagcaggacggcttcagcattctctccaccgccagctccgccgaggggcgcatcgtcgcttccacccaccacggcctggcctgcatcctggtcgccgccgaaggtgccggggaaaaccagcgcctgctgcaggatgtggtcgaactgatccgcgtggcccgcgtgcgggcgccgcaattgccgatcttcgccctcggcgagcaggtgaccatcgagaacgcgccggccgagtccatggccgacctgcaccagttgcgcggcatcctctacctgttcgaagacaccgtgccgttcctcgcccgccaggtcgcccgggcggcgcgcaactacctggccgggctgctgccgccattcttccgtgcgctggtcgagcacaccgcgcagtccaactattcctggcatacgccgggccacggcggcggtgtcgcctatcgcaagagtccggtgggacaggcgttccaccagttcttcggggagaacacgctgcgttccgacctgtcggtctcggtccccgagctgggctcgctgctcgaccataccggccccctggccgaggccgaggaccgtgccgcgcgcaatttcggcgccgaccataccttcttcgtgatcaatggcacttccaccgcgaacaagatcgtctggcactccatggtcggtcgcgaagacctggtgctggtggaccgcaactgccacaagtcgatcctccactcgatcatcatgaccggggcgataccgctctacctgactccggaacgcaacgaactggggatcatcgggccgatcccgctgagcgaattcagcaaggagtcgatcgccgcgaagatcgccgccagcccgctggcgcgcggccgcgagccgaaggtgaagctggcggtggtgaccaactccacctacgacggcctgtgctacaacgccgagctgatcaagcagaccctcggcgacagcgtcgaggtgttgcacttcgacgaggcttggtacgcctatgccgcgttccacgagttctacgacggacgctatggcatgggcacctcgcgcagcgaggagggccccctggtgttcgccacccactccacgcacaagatgctcgccgccttcagccaggcctcgatgatccacgtgcaggatggcgggacccggaagctggacgtggcgcgcttcaacgaagccttcatgatgcacatctcgacctcgccgcagtacggcatcatcgcttcgctggacgtggcttcggcgatgatggaagggcccgccgggcgttcgctgatccaggagaccttcgacgaggccctcagcttccgccgggccctggccaacgtacggcagaacctggaccggaacgactggtggttcggcgtctggcagccggagcaggtggagggcaccgatcaggtcggcacccatgactgggtgctggagccgagcgccgactggcacggcttcggcgatatcgccgaagactacgtgctgctcgatccgatcaaggtcaccctgaccaccccgggcttgagcgccggcggcaagctcagcgagcaggggattccggctgccatcgtcagccgcttcctctgggagcgcgggctggtggtggagaaaaccggtctctactccttcctggtgctgttctcgatgggcatcaccaagggcaagtggagcaccctggtcaccgaactgctcgaattcaagcgctgttacgacgccaacctgccgctgctcgacgtcttgccctccgtggcccaggccggcggcaagcgctacaacggcgtgggcctgcgcgacctcagcgacgccatgcacgccagctaccgcgacaacgccacggcgaaggccatgaagcgcatgtacacggtgctgccggaggtcgcgatgcggccgtccgaggcctacgacaagctggtgcgcggcgaggtcgaggcggtaccgatcgctcggttggaagggcgcatcgctgccgtcatgctggtaccctatccgccgggtatcccgctgatcatgccgggtgagcgcttcaccgaggcgacccgctcgatcctcgactatctcgagttcgcgcggaccttcgagcgcgccttccctggtttcgactccgatgtgcacggcctgcagcatcaggacggaccgtccgggcgctgctataccgttgaatgcataaaagaatga

SEQ ID NO: 157406 - protein, 751 aa, Pseudomonas aeruginosa UCBPP-PA14
MYKDLKFPVLIVHRDIKADTVAGERVRGIAHELEQDGFSILSTASSAEGRIVASTHHGLACILVAAEGAGENQRLLQDVVELIRVARVRAPQLPIFALGEQVTIENAPAESMADLHQLRGILYLFEDTVPFLARQVARAARNYLAGLLPPFFRALVEHTAQSNYSWHTPGHGGGVAYRKSPVGQAFHQFFGENTLRSDLSVSVPELGSLLDHTGPLAEAEDRAARNFGADHTFFVINGTSTANKIVWHSMVGREDLVLVDRNCHKSILHSIIMTGAIPLYLTPERNELGIIGPIPLSEFSKESIAAKIAASPLARGREPKVKLAVVTNSTYDGLCYNAELIKQTLGDSVEVLHFDEAWYAYAAFHEFYDGRYGMGTSRSEEGPLVFATHSTHKMLAAFSQASMIHVQDGGTRKLDVARFNEAFMMHISTSPQYGIIASLDVASAMMEGPAGRSLIQETFDEALSFRRALANVRQNLDRNDWWFGVWQPEQVEGTDQVGTHDWVLEPSADWHGFGDIAEDYVLLDPIKVTLTTPGLSAGGKLSEQGIPAAIVSRFLWERGLVVEKTGLYSFLVLFSMGITKGKWSTLVTELLEFKRCYDANLPLLDVLPSVAQAGGKRYNGVGLRDLSDAMHASYRDNATAKAMKRMYTVLPEVAMRPSEAYDKLVRGEVEAVPIARLEGRIAAVMLVPYPPGIPLIMPGERFTEATRSILDYLEFARTFERAFPGFDSDVHGLQHQDGPSGRCYTVECIKE

SEQ ID NO: 157407 - DNA, 2163 bp, Shewanella sp. ANA-3
  CDS (1)..(2163): transl_table=11
atgaaatcattaaaagttgccgccagcttatctgttagatcatgttttgaaatagacagagaagttgtcaatgtattaaccacagatttttgcgatgtgggcgcggctgtagtctctgttgatgatgttaaaaatggtattgttgaaaaaattaaaaataccggattaaaactgcctattttcgtatcagtttgttgtgaagaaaccttcccagatgatatttgctcttctattaccggggtatttgagctctgcggtagcaataccgatttctatggtaaacaggtcgaaaccgccgtccaaaaatatgaacaagccctattaccgcctttctttggcacactgaaaaaatacgtggaaatgggcaactccaccttcgcctgtccaggccatcagggtggtcaattcttccgtaaacatcctgtgggtcgccaatttttcgatttctttggcgaaaccattttccgctcagatatgtgtaatgccgacgttaaactcggcgatctattaatccacgaaggcgcgccgctggatgcacaaaaatacgcggctaaggtctttaacgccgataaaacctactttgtgctcaacggcacttcttcttcaaacaaagtggcgaccaacgcactgctggcgaagggcgacctggtattattcgaccgtaacaaccataaatccaaccaccatggcgcgttaattcaagccggtgcaacaccgatttatttagaaaccgcccgtaaccccttcggctttattggtggtatcgacgcccactgcttccaagagtcttatttaagggaacaaatccgcgccgttgcacctgagcgtgccgatgaacaacgtccattccgcttagccattatccaactaggcacctacgacggtactatctacaatgctcgccaagtcgttgatcgtattggacatctatgtgattacatcctgtttgactcagcttgggttggctacgagcaatttattcctatgatgaatgactgctcgcctctgctgctcgaactgacgcctgaagatcccggtattatcgtgactcagtcagtgcacaaacagcaggcaggcttctcacaaacctcgcaaattcacaaaaaagactcacatatcaaaggccaagccagatactgcaaccataaacgcttcaacaacgcctttatgatgcatgcctctaccagccccttctatccgctgtttgccgcattggatgtgaacgctaaaatgcacgaaggcgccagcggccgttatctatggcgtgaggcggttaaagctggtattgaagctcgcaagttactgctcaaaaaatgtaaatatatcaagccatttatcccaagcatgatcgagggacgcccatggcaggattatccaaccgaacaaatggccgatgatttacgtttcttcgagtttgaacccggacaaaaatggcactccttcgacggttacgaaaaaggccaatatttcgtagacccttgtaagttcctattaaccacgcctggtatcgatgccgaaaccggtaaatatactgagttcggtattcctgcaactattctggctaacttcttacgtgaaaataatattattcccgagaagtgcgacttaaattcgattttattcctgatgacacctgcggaagatatggcgaagatgcaacacttagtgtcgcaaatatctcgcttcgagaaattagtcgatgaagatgcgccattatctgaagtattacctaacgtctataacgctaataaagcccgttataaagactataccattcgtcaactctgccaagaaatgcacaacctttatgtcagccatgacgtaaaacaactgcaaaaagaaatgttccgccaggcgcatttcccaacaaaagtgatggatccacaggaagccaacctcgagtttatccgtggcaaagtggagttagtgccactgtcacaaattgagggacgcattgctgcagaaggtgcattgccttatccacctggagtgttatgtgtggtcccaggtgaaatatggggcggcgcggtacaacgttatttcttagcccttgaagaaggcatcaacttattacccggattctcccctgaattacaaggtgtttacctcgaaacccccccagacggaaaaatccaagccctaggttatgtattaaataaataa

SEQ ID NO: 157408 - protein, 720 aa, Shewanella sp. ANA-3
MKSLKVAASLSVRSCFEIDREVVNVLTTDFCDVGAAVVSVDDVKNGIVEKIKNTGLKLPIFVSVCCEETFPDDICSSITGVFELCGSNTDFYGKQVETAVQKYEQALLPPFFGTLKKYVEMGNSTFACPGHQGGQFFRKHPVGRQFFDFFGETIFRSDMCNADVKLGDLLIHEGAPLDAQKYAAKVFNADKTYFVLNGTSSSNKVATNALLAKGDLVLFDRNNHKSNHHGALIQAGATPIYLETARNPFGFIGGIDAHCFQESYLREQIRAVAPERADEQRPFRLAIIQLGTYDGTIYNARQVVDRIGHLCDYILFDSAWVGYEQFIPMMNDCSPLLLELTPEDPGIIVTQSVHKQQAGFSQTSQIHKKDSHIKGQARYCNHKRFNNAFMMHASTSPFYPLFAALDVNAKMHEGASGRYLWREAVKAGIEARKLLLKKCKYIKPFIPSMIEGRPWQDYPTEQMADDLRFFEFEPGQKWHSFDGYEKGQYFVDPCKFLLTTPGIDAETGKYTEFGIPATILANFLRENNIIPEKCDLNSILFLMTPAEDMAKMQHLVSQISRFEKLVDEDAPLSEVLPNVYNANKARYKDYTIRQLCQEMHNLYVSHDVKQLQKEMFRQAHFPTKVMDPQEANLEFIRGKVELVPLSQIEGRIAAEGALPYPPGVLCVVPGEIWGGAVQRYFLALEEGINLLPGFSPELQGVYLETPPDGKIQALGYVLNK

SEQ ID NO: 157409 - DNA, 2244 bp, Azoarcus sp. BH72
  CDS (1)..(2244): transl_table=11
atgcgattccattttccgatcatcatcatcgacgaggacttccgctccgagaacacctcggggctgggcatccgcgcgctcgccacagccatcgaggaagagggcatggaggtgctcggggtcacgagctacggcgacctgacctctttcgcccagcagcagagccgcggttcgggcttcatcctgtcgatcgacgatgaagagttttcctcgcccgaggcctcggccaaggcaattgccgacctgcgcagcttcgtcgaggagatccgcctgcgcaacgccgacatcccgatcttcctgcacggggagacgcgcaccagccgtcatattccgaacgatgtgctgcgcgagatgcacggcttcatccacatgttcgaggacacgccggagttcatcgcgcgctacgtcgtgcgcgaggcgcgcaactacctcgagtcgctgccgccgccgttcttccgcgcgctgacgcactacgcggcggacggctcgtattcctggcactgcccgggccattccgggggcgtcgcgttcctgaagagtccggtcgggcagatgttccaccagttcttcggcgagaacatgctgcgggcggacgtctgcaacgcggtggatgaactcggccagttgctcgaccacaccggcccggtggctgcgtccgagcgtaacgcggcgcgcatcttcaactgcgatcacctgtacttcgtcaccaacggcacttcgacctcgaacaagatggtgtggcacaccacggtggcgcccggcgacatcgtcgtcgtcgaccgcaactgccacaagtccatcctgcactccatcatcatgaccggcgcggtgccggtgttcctgacgccgacccgcaaccactacggcatcatcggcccgatcccgctggaggagttctcgatggagaacatccagaagaagatcgaggccaacccgttcgcacgcgaagcgaagagcaagaagccgcgcatcctcaccatcacccagtcgacttacgacggcgtggtgtacaacgtcgagaccatcaaggagatgctcgacggcaagatcgacacgctgcacttcgatgaagcctggctgccgcacgcggccttccacgacttctacggcgactaccacgcgatcggcgaggatcgtccgcgctgccgcgagtcgatgatcttctcgacgcaatcgacccacaagctgctcgccggcctcagccaagcgtcgcagatcctcgtgcaggactcgcagacccgcaagctcgaccgcgacatcttcaacgaggcctatctgatgcacacctccacctcgccgcagtacgcgatcatcgcgtcctgcgacgtggcggcggcgatgatggagccgccgggcggtgccgcgctggtggatgaatcactggcggaggcggtcgagttccgccgtgcgatgcgcaaggtggatgccgagttcggcgaatccgactggtggttccgggtgtggggcccggagtatctcgccgaggaaggcctgggcgagcgtgacgactggatgctgaagaacggcgaacgctggcacggtttcggtgatctggcgccgggcttcaacatgctggatccgatcaaggctaccgtgatcacgccggggctggatgtggatggcgactttgccgactggggaatcccggcgggcatcctcacgcgctacctggccgagcacgggatcatcgtcgagaagaccgggctgtattcgttcttcatcatgttcacgatcggtatcaccaaggggcgctggaacacgttggtgaccgaactccagcagttcaaggacgactacgatcgcaaccagcctttgtggcgcgtgatgccggacttcattgccaagcatccgcgctacgagaaagtggggttgaaggacctgtgcgcgcagatccacagcttctacaaggcccacgacgtggcacggctgaccaccgagatgtacctgtcggacatggtgcccgcgatgaaaccggccgacgccttcgccaagatggcgcaccgtgaaatcgaacgggttctgatcgacgaactggaggatcgcgtcaccgcgatgctggtaacgccgtatccgccgggtattcccctgctaattccgggcgagcgcttcaatccgacgatcgtgcgctatctgcagttcgcacgcgatttcaacgcccgcttccccgggttcgaaaccgacatccacgggctggtgaagggagacgacggccgttactacgtggattgcgtagcggcagactag

SEQ ID NO: 157410 - protein, 747 aa, Azoarcus sp. BH72
MRFHFPIIIIDEDFRSENTSGLGIRALATAIEEEGMEVLGVTSYGDLTSFAQQQSRGSGFILSIDDEEFSSPEASAKAIADLRSFVEEIRLRNADIPIFLHGETRTSRHIPNDVLREMHGFIHMFEDTPEFIARYVVREARNYLESLPPPFFRALTHYAADGSYSWHCPGHSGGVAFLKSPVGQMFHQFFGENMLRADVCNAVDELGQLLDHTGPVAASERNAARIFNCDHLYFVTNGTSTSNKMVWHTTVAPGDIVVVDRNCHKSILHSIIMTGAVPVFLTPTRNHYGIIGPIPLEEFSMENIQKKIEANPFAREAKSKKPRILTITQSTYDGVVYNVETIKEMLDGKIDTLHFDEAWLPHAAFHDFYGDYHAIGEDRPRCRESMIFSTQSTHKLLAGLSQASQILVQDSQTRKLDRDIFNEAYLMHTSTSPQYAIIASCDVAAAMMEPPGGAALVDESLAEAVEFRRAMRKVDAEFGESDWWFRVWGPEYLAEEGLGERDDWMLKNGERWHGFGDLAPGFNMLDPIKATVITPGLDVDGDFADWGIPAGILTRYLAEHGIIVEKTGLYSFFIMFTIGITKGRWNTLVTELQQFKDDYDRNQPLWRVMPDFIAKHPRYEKVGLKDLCAQIHSFYKAHDVARLTTEMYLSDMVPAMKPADAFAKMAHREIERVLIDELEDRVTAMLVTPYPPGIPLLIPGERFNPTIVRYLQFARDFNARFPGFETDIHGLVKGDDGRYYVDCVAAD

SEQ ID NO: 157411 - DNA, 2160 bp, Haemophilus somnus 2336
  CDS (1)..(2160): transl_table=11
atgttaaaattaaaaatcgcacatagcccattagtgcaaaaatattttacatcaactcgtgaattagttttattaaatcaaactgatttcaccgatataggtgcaataatattgactgccgaagatgttaagtatattcaacaaataaaaacgactgaatttaatattcctatttttgtcgtattaaatgaaggtgaaacactttctgatgaatattttgatcaggtttatcatgttcaagatctaaacagctatgatatcaatttgtatagccgtcaaattgaaacagctgcgtctctttatgagcaaaaaatgttacctccattctttaaaatgttaagcgaatatgtcgaaatgggtaatttggcatttgattgtccgggacaccaaggcggtcaatatttccgcaaacatccagccggccgttatctatacgatttctatggagaaaatattttccgttcagatatttgtaatgctgatgtgaaattgggagatttactaatacatgagggtgctccatgtgatgctcaacaacatgcagcaaaagtatataatgcagataaaacatattttgtgctaaacggaacttccgcctccaataaagtggtttgtaacgcactacttgcaccgggtgatctagtattatttgaccgcaacaatcacaaatcaaatcaccacggtgctttaattcaagcgggtgcaacccctgtttacttggaaactgcccgtaatccattcggcttcatcggcggtattgataaccactgttttgaagaagcatatcttaaaaaattaatcgcagaagtggcaccggaaaaacttgaagagaaacgtcctttccgtcttgcaattattcaattgggtacctatgacggaacaatttataacgccaaacaagttgttgaacgtattggacatttatgcgattacatcttgttcgattctgcatgggtcggctatgaacaattcattccaatgatgaaagattgctctccattattactagatttagatgaaaatgaccctggtattatcgtgacacaatcggtacataaacaacaagcaggtttctcacaaacatcacaaattcataaaaaagacaaacatattaaaggacaagcaagatattgcaatcacaaacgctttaataatgcctttatgttgcatgcgtctaccagcccattctatcctctattcgccactctggatgtaaacgctcaaattcaaggttctcctgcagggaaacgtctatgggccgagtgtgtagaagttggtatcgaggcaagaaagttaatgcttaagcactgcactttaatcaaaccatttattcctccttatgtgaaaggtaaaaaatggcaagatcacgatactaaagaaattgcaaatgatcttgagtttttcaatttccatgcaaatgatacatggcataaatttgagggttatacagataatcaatattttgttgacccttgtaaattcatgctcacaactccggggattaacattgaaacaggggaatatgaagactttggtattccagcaacaatccttgctaacttcttgcgagaaaatggaatcattcctgaaaaatgtgacttgaactccattttattcttgcttacaccggctgaaacattgacaaaaatgcaaactttagttgctcaaatagctgcgtttgaaaaacatatcaaacaaaactcattactcaaagatgtactgcctactgtgtacaaaaataatgaggaacgctatcagggctacactatcagacaattatgtcaagaaatgcacaatctttacgtcagtagaaatgttaaacagctacaacgtgacttgtttagaaaaacaactctaccggaatatgctatgaacccacaaaaagcgaatatcgaatttgttcgtaacaaaattgaattagttccattgacagatattgtggggagaatcgccgccgaaggtgcattaccttaccctccaggtgttttatgtgttgttcccggtgaacgttggagtacgacagtacaacaatatttccttgcactggaagaaggcattaatgttcttcctggattcgcaccggaaattcagggcgtatatctacaaaaagatcctgatggacgtacacgtgcttatggatatgtattaactgaagcataa

SEQ ID NO: 157412 - protein, 719 aa, Haemophilus somnus 2336
MLKLKIAHSPLVQKYFTSTRELVLLNQTDFTDIGAIILTAEDVKYIQQIKTTEFNIPIFVVLNEGETLSDEYFDQVYHVQDLNSYDINLYSRQIETAASLYEQKMLPPFFKMLSEYVEMGNLAFDCPGHQGGQYFRKHPAGRYLYDFYGENIFRSDICNADVKLGDLLIHEGAPCDAQQHAAKVYNADKTYFVLNGTSASNKVVCNALLAPGDLVLFDRNNHKSNHHGALIQAGATPVYLETARNPFGFIGGIDNHCFEEAYLKKLIAEVAPEKLEEKRPFRLAIIQLGTYDGTIYNAKQVVERIGHLCDYILFDSAWVGYEQFIPMMKDCSPLLLDLDENDPGIIVTQSVHKQQAGFSQTSQIHKKDKHIKGQARYCNHKRFNNAFMLHASTSPFYPLFATLDVNAQIQGSPAGKRLWAECVEVGIEARKLMLKHCTLIKPFIPPYVKGKKWQDHDTKEIANDLEFFNFHANDTWHKFEGYTDNQYFVDPCKFMLTTPGINIETGEYEDFGIPATILANFLRENGIIPEKCDLNSILFLLTPAETLTKMQTLVAQIAAFEKHIKQNSLLKDVLPTVYKNNEERYQGYTIRQLCQEMHNLYVSRNVKQLQRDLFRKTTLPEYAMNPQKANIEFVRNKIELVPLTDIVGRIAAEGALPYPPGVLCVVPGERWSTTVQQYFLALEEGINVLPGFAPEIQGVYLQKDPDGRTRAYGYVLTEA

SEQ ID NO: 157413 - DNA, 2259 bp, Pseudoalteromonas tunicata D2
  CDS (1)..(2259): transl_table=11
atgaagtttcgttttcccgtagtaattatcgatgaagattttcgctctgaaaatatttcaggatctggcattcgcgatttagcccacgcgattggcgagcaaggttatgaaattgttggttttactagctatggcgatttaagtgcgtttgcacagcaagctagtcgtgcctcgtgttttattttatctatcgatgatgaagagtttggaaccggtactgctgaagaagttgagcacgcattagtcgcactgcgtgaatttattgtgcaagtgcgccgtcgcaatagcgatatccctatttttctttatggtgaaacgcgtaccgcagaacatattccaaatgatgtactgcgccaactacacggctttattaatatgtttgaagataccgctgattttgtggccaagtatattatccgtgaagcaaaaaaatatttagattctttagcaccgccgttttttaaagccctaatgaattatgccagcgatggttcttactcttggcattgtccgggtcactcaggtggcgtggcatttttgaaaagccccgttggacaaatgttccaccagttttttggcgaaaacatgctgcgcgccgatgtctgtaactcggttgatgagttaggccaattgcttgatcacacaggcccagttgctaaaagtgagcaaaatgcggcgcgaatttttaaagccgaccatttgttttttgttactaacggcacttcaacatcgaataaaattgtttggcattctaccgttgcgccgggtgatattgtcgtagttgaccgtaactgtcataaatcgattttacattcgatcatcatgaccggtgctattccggtgtttttaatgccaacacgtaaccattacggcattattgggcctattccaaaacatgagttttcaccggagtctatcaaagctaaaattgatgcccatccgtttgcgtctaaagctaaaaataaaaatccacgtattttaaccattacccaaagtacctacgatggcgtactttataatgtggaacaaattaaagcagagcttggttcgtatgttgatacgctgcattttgatgaggcgtggctaccccatgcgacgtttcatgagttttatcaagatatgcatgccattggtggcgatgaacgcccgcgttctgatgatgcggtggtatttgcaacgcaatcaacccataagctactagctggtatttctcaggcatcacaaattttggtgcaaaatgctaaaaatcgtccacttgatacccatagatttaatgaatcatacttaatgcattcatcaacgagcccgcaatattcaattattgcttcgtgtgatattgcagctgccatgatggagcaacctggtggccgagctttggttgaagaatcgttatctgaagcgattgattttcgccgagcgatgcgcaaagtcgctgctgaatttggtgacgatgattggtggttcagcgtttggggaccaaaaaatctgccagaaagtggcattggtggccgtgaagattggttagtaaaagcacaagatgattggcatcaatttggtgatattgaagctggctttaatatgctcgatccgattaaagcgaccattattacccctggacttggtgctgatggcagctttgaggccacaggtattccggctacaattttaactaaatatttggctgaacacggtattgtggttgaaaaaacaggcctgtattcattctttattatgtttaccattggtattactaaaggtcgttggaattcaatggtcactgaattacaacagtttaaagatgattatgaccaaaacttacctctttggcgtattttacctgagtttgtagagcgcaatcctcaatatgaaaaagtaggtttaaaagatttgtgtcagcagatccacgcgatttatcagcagtttgatatttctaaagtgacaacaaatatgtacctttccagtattgagcctgcgatgttaccagccgatgcatggactaaaatggctcaccgtgaaattgagcgtgtcagtattgatgagctagaagggcgcattaccgcgatgttagtgacaccgtatccaccggggatcccattgatggtgccaggtgagcgtttcaatacaacgattatcaattatttaaagttcactcgtgaatttaacgagcgtttcccagggtttgagacagatgttcatggtctggtgcgcgaaaaaattgatggcactaaccattattttgttgatgtagttggtcaataa

SEQ ID NO: 157414 - protein, 752 aa, Pseudoalteromonas tunicata D2
MKFRFPVVIIDEDFRSENISGSGIRDLAHAIGEQGYEIVGFTSYGDLSAFAQQASRASCFILSIDDEEFGTGTAEEVEHALVALREFIVQVRRRNSDIPIFLYGETRTAEHIPNDVLRQLHGFINMFEDTADFVAKYIIREAKKYLDSLAPPFFKALMNYASDGSYSWHCPGHSGGVAFLKSPVGQMFHQFFGENMLRADVCNSVDELGQLLDHTGPVAKSEQNAARIFKADHLFFVTNGTSTSNKIVWHSTVAPGDIVVVDRNCHKSILHSIIMTGAIPVFLMPTRNHYGIIGPIPKHEFSPESIKAKIDAHPFASKAKNKNPRILTITQSTYDGVLYNVEQIKAELGSYVDTLHFDEAWLPHATFHEFYQDMHAIGGDERPRSDDAVVFATQSTHKLLAGISQASQILVQNAKNRPLDTHRFNESYLMHSSTSPQYSIIASCDIAAAMMEQPGGRALVEESLSEAIDFRRAMRKVAAEFGDDDWWFSVWGPKNLPESGIGGREDWLVKAQDDWHQFGDIEAGFNMLDPIKATIITPGLGADGSFEATGIPATILTKYLAEHGIVVEKTGLYSFFIMFTIGITKGRWNSMVTELQQFKDDYDQNLPLWRILPEFVERNPQYEKVGLKDLCQQIHAIYQQFDISKVTTNMYLSSIEPAMLPADAWTKMAHREIERVSIDELEGRITAMLVTPYPPGIPLMVPGERFNTTIINYLKFTREFNERFPGFETDVHGLVREKIDGTNHYFVDVVGQ

SEQ ID NO: 157415 - DNA, 2358 bp, Xanthobacter autotrophicus Py2
  CDS (1)..(2358): transl_table=11
atggactatttcaagcgattcaacttcctgttcgcgaccccggtgttcgacgccgaggatctggagggcgcccgctacaaccagatcgtcgcggagatcgagcgttccggcttcgaggtggtgaaggcgcgcaacctcgaagacgccgagatcgcggtgcagaccgatgccgccatcggctgcatgctggtggactggggcaagaaggggctggagggcaagaccgccgccctcatcaacctgatgcgccggcgcggcctcgacttccccatcctcctgctgatccgccgcaagcgcttcgaggatgtgccggtggaggtgctggacttcatcgacggctacgtcttcctctccgaggaaacccccgccttcatcgccaagaacctcatcagccggctcaagcaatatgccgagacgctgaagacccccttcttcggcgcgctggtggactatgccgaagagggcaaccagctgtggacctgccccgggcacaatggcggcgtgttctattcccgcagccccatcggccgggtgttcatggagcatctgggcgaggcggtgttccgcgacgacctcgacaattccgtgctcgacctcggcgacctcctgacccacgagggcccggcgctggcggcgcagaaggaggcggcgaagatcttcggcgccgagaagacctatttcgtcctcaacggcacctccacctccaacaaggttgcgctttcggccctcgtcaccgacggcgacctggtgctgttcgaccgcaacaaccacaaggccgcccaccacggcgcgctgatgatctccggcggcatcccggtctatgtgcccaccgtgcgcaacgcccatggcctcatcggccccatggacttcgccgcgctggacgagaccgccctgcgcgagcgcatccgcacccatcccctggtgaaggatccggacgcgtggcagaaaccgcgcccgttccgggtggcggtggtggagcagtgcacctatgacggcaccatccacaatgccgagatgatcctcaaggccatcggccacctcaccgactacatcctgttcgacgaggcctgggcgggcttcatgaagttccacccgctctatgccggccgcttcgccatgggccttgccgacctcggccccgacgcgccgggcatcatcgccacccagtcgacccacaagcagctggcgagcttctcgcaggcctcccagatccacatgaaggaccggcacatcaccggccagaagcggcgggtggagcaccggcgcttcaacgagagcttcatgcagcacgcctccacctcgcccttctatcccttgttcgcctccctcgacgtgggcgcgcagatgatgaagggccggtccggtgaagtgctgtgggacgacaccatccgcctcggcatcgagctcaggaagaagatccgagccgtgcgccgcgagttcgaggagaaggagcttcgccccgagcgccgctggttcttcgagccgttcgtgccggaccgggtggccatccccgacgtgtcgagccccggcgcggtgcatgaggtgccgtgggaaagcgtcgccaccgatctcctcgccaccaaccccgccttctggcacctgacccccggcgcgtcctggcatggcttcgagggcatggcggcgggtttcgccatgaccgaccccaacaagctgacccttctgacccccggcttcgaccgcgccaccggcgcctatgccgagcacggcatcccggcgcccgtggtggcgcaatatctgcgcgagaaccgcatcgtcgccgagaagaacgaccttaattccctgctgttcctgctcacccctggggtggaggcatcgaaggcgggcacgctcatctccggcctcgtcgccttcaagaagctgcatgacgagaatgcgcttctggaagaggcgatcccggaatttttccgccgtcgtcccgcccgctatgggggcgtgcggctgcgcgacctgtgcggggagatgcaccgcttcttccgcgccgcgaatgtgagcgcactccaggccatgcaattttccgccgcgcacctgccggacatcgcgctgtcgccccacgacgcggcccgctgcctggtgcgcaacgacgtggactacctgcccatcgacgccatctccggccgcatcgcgaccacgcccttcgtggtctatccgccgggcatcgccaccatcgtgccgggcgagcggctgaccgagcgggccaagcccatgatcgactatctcaagatgttcgaagcgagcttcaacaccttccccggcttcgacgtggagatccagggcctgtatcgcgagacggatgcatccggccgcgtgcggctccatacttacgtcgtcgcggaatag

SEQ ID NO: 157416 - protein, 785 aa, Xanthobacter autotrophicus Py2
MDYFKRFNFLFATPVFDAEDLEGARYNQIVAEIERSGFEVVKARNLEDAEIAVQTDAAIGCMLVDWGKKGLEGKTAALINLMRRRGLDFPILLLIRRKRFEDVPVEVLDFIDGYVFLSEETPAFIAKNLISRLKQYAETLKTPFFGALVDYAEEGNQLWTCPGHNGGVFYSRSPIGRVFMEHLGEAVFRDDLDNSVLDLGDLLTHEGPALAAQKEAAKIFGAEKTYFVLNGTSTSNKVALSALVTDGDLVLFDRNNHKAAHHGALMISGGIPVYVPTVRNAHGLIGPMDFAALDETALRERIRTHPLVKDPDAWQKPRPFRVAVVEQCTYDGTIHNAEMILKAIGHLTDYILFDEAWAGFMKFHPLYAGRFAMGLADLGPDAPGIIATQSTHKQLASFSQASQIHMKDRHITGQKRRVEHRRFNESFMQHASTSPFYPLFASLDVGAQMMKGRSGEVLWDDTIRLGIELRKKIRAVRREFEEKELRPERRWFFEPFVPDRVAIPDVSSPGAVHEVPWESVATDLLATNPAFWHLTPGASWHGFEGMAAGFAMTDPNKLTLLTPGFDRATGAYAEHGIPAPVVAQYLRENRIVAEKNDLNSLLFLLTPGVEASKAGTLISGLVAFKKLHDENALLEEAIPEFFRRRPARYGGVRLRDLCGEMHRFFRAANVSALQAMQFSAAHLPDIALSPHDAARCLVRNDVDYLPIDAISGRIATTPFVVYPPGIATIVPGERLTERAKPMIDYLKMFEASFNTFPGFDVEIQGLYRETDASGRVRLHTYVVAE

SEQ ID NO: 157417 - DNA, 2148 bp, Vibrio sp. Ex25
  CDS (1)..(2148): transl_table=11
atgcctgaagactttagcttattagctgaatctttagatgaacaatttaatcgtcacttactgcctttagaacaagttgaattaaccgacgttggtgcagctattattacgtcaacagacattaaagcgggtctgcacagaatgatttcggaaacagggtacggaatccctgttttcttagtgaccgatgaaactccagtttcggcagaagattacgtttggttaacgggggttattgatttagaaagacaatctatcgattactactgccgtcaaattaatgaagccgtgactaaatatgagtgtcgtctgctccctcctttcttcaagcaattaacgcactacgttgagatgggtaactcggcgtttgactgtccagggcaccaaggtggtcagttcttcaaaaaacaccctgctggtaaacaattctacgatttctttggcgaaaacctattccgtagcgacttgtgtaacgcggacgtggacttaggtgacttactgatccacgaaggttctgcacaccaagcgcaagcacacgctgcaaaagtatttaacgctgacaaaacttacttcgtactcaacggtacttctgcttcaaacaaagttgtgtgtaacgcgctagtaactgaaggcgatttggtattgttcgaccgcaataaccacaagtcgaatcaccacggcgcgttaatccaagcgggtggtatgccagtttatctagaaacggcgcgtaacccttggggcttcattggtggtatggatgagcactgtttcgatgaagagtatattcgtgctcaaatcgcgaaagtatctccagagcgtgcacgagatgaacgtccgttccgtctggccatcatccagttgggtacttacgacggtacaatttataacgctcgttacgtcatggataagattggccacctttgtgactacatcttgtttgactcggcatgggtaggctatgagcagttcatccctatgatgaaagactgttcgccactgctactggatctgaaaccagaagatgcgggtgtgatcgtgactcagtctgttcacaagcaacaagctggcttctctcaaacgtcgcaaatccacaaaaaagaccgccatatcaaaggccaagctcgttactgcaatcacaaacgctttaacaacgcgtttatgatgcacgcatcgacatctcctttctatgcgttgtttgctgcattggatgtgaacgcgaagatccacgatggtgaagcaggcttacgtttatggagcgacgcggttaagaccggtatcgaagcgcgtaaagaaattctcaaaagttgtgagttaattcgtccgttcattccaaatgaaattgaaggtcaaccttggggcagttacgacactgatgtgatcgcgaccaacaagaagttcttcatgttcgagccagatgcaaactggcacaagtttgaaggttatggcgaaggtcaatactttgttgacccatgtaaattgttgctaaccacggcaggtattgcagaagacggcagctacgcagatttcggtattccggcaacgctattggcgaacttccttcgagaaaacggcatcatccctgagaagtgtgacttgaactccatcttgttcctactcactcctgctgaagatatgggtaagatccgtcaccttgtcgcgcaaatcaaccgatttgaaaaattcattcgtgatgatgcacctctcagtatcgtgctaccaggcgtctacgaagcgaacaaagagcgctaccgtggttacaccatccgtcagctatgtcaggaaatgcatgacatgtacaaagagctgaacgtgaaacagctacaaaaagcgatgttccgcagtgaatacttcccacaaatggttcacaaaccagacgtggcaacacgcaaatacttccgcggtgaatgcgattacctaccacttaaagaggccgtcggccgcgtagccgccgaaggtgcgctgccttaccctccaggcattatctgtgtgatcactggtgaaatctggacccaacaggtggtggattacttcttatctctagaagaaggcatcaaccgattcccaggcttcgcgccagaaattcaaggtgtgtaccttgaagatgtcgacggtcgcactaccgcacattgctatgtcctaaaagattaa

SEQ ID NO: 157418 - protein, 715 aa, Vibrio sp. Ex25
MPEDFSLLAESLDEQFNRHLLPLEQVELTDVGAAIITSTDIKAGLHRMISETGYGIPVFLVTDETPVSAEDYVWLTGVIDLERQSIDYYCRQINEAVTKYECRLLPPFFKQLTHYVEMGNSAFDCPGHQGGQFFKKHPAGKQFYDFFGENLFRSDLCNADVDLGDLLIHEGSAHQAQAHAAKVFNADKTYFVLNGTSASNKVVCNALVTEGDLVLFDRNNHKSNHHGALIQAGGMPVYLETARNPWGFIGGMDEHCFDEEYIRAQIAKVSPERARDERPFRLAIIQLGTYDGTIYNARYVMDKIGHLCDYILFDSAWVGYEQFIPMMKDCSPLLLDLKPEDAGVIVTQSVHKQQAGFSQTSQIHKKDRHIKGQARYCNHKRFNNAFMMHASTSPFYALFAALDVNAKIHDGEAGLRLWSDAVKTGIEARKEILKSCELIRPFIPNEIEGQPWGSYDTDVIATNKKFFMFEPDANWHKFEGYGEGQYFVDPCKLLLTTAGIAEDGSYADFGIPATLLANFLRENGIIPEKCDLNSILFLLTPAEDMGKIRHLVAQINRFEKFIRDDAPLSIVLPGVYEANKERYRGYTIRQLCQEMHDMYKELNVKQLQKAMFRSEYFPQMVHKPDVATRKYFRGECDYLPLKEAVGRVAAEGALPYPPGIICVITGEIWTQQVVDYFLSLEEGINRFPGFAPEIQGVYLEDVDGRTTAHCYVLKD

SEQ ID NO: 157419 - DNA, 2199 bp, Escherichia coli B
  CDS (1)..(2199): transl_table=11
atgtcaaaattaaaaattgcggttagtgattcttgcccggactgttttaccacgcagcgagaatgtatctacattaatgaaagtcgtaatatcgatgtggcggcaatagttttatcgctcaacgatgttacatgcggaaaactcgatgaaatcgatgccacgggttatggcatcccggtatttattgctactgaaaatcaagaacgtgtacccgcagagtatttgccccgtatttcgggtgtctttgagaattgcgaatcgcgacgagaattttatggtcgccagttagaaaccgctgccagccattatgaaactcaactgcgcccacctttcttccgcgcactggtcgattatgtcaatcaaggtaacagcgcgtttgattgccctggtcatcagggcggcgaatttttccgtcgccatccggcggggaatcagtttgtggaatactttggtgaggcgctgttccgtgccgacttgtgcaacgccgacgtagcgatgggcgatctgctgattcacgaaggcgcgccatgcattgcacagcaacatgcggcaaaagtgtttaatgccgataaaacctacttcgttttaaatggcacttcatcttctaacaaagtggttttaaacgccctgctaacaccgggtgatctggtgctgtttgatcgcaataaccacaaatctaaccaccacggagcgttgctacaggctggtgcaacaccggtttatctggaaacggcacgtaacccgtatggctttatcggtggcattgatgcgcactgttttgaagaaagttacctgcgtgagctgatcgcggaagtcgcaccgcagcgggcaaaagaggctcgtcctttccgcctcgctgtgattcagttaggcacctacgacggtacgatttataacgcccgccaagtggtggataaaattggtcatctgtgtgactacatcctgtttgactcagcatgggtcggctatgaacagtttattccgatgatggcggactgttcgccgctgttgctggatcttaatgagaacgatccgggtattctggttacgcaatctgtgcataaacaacaggctggtttttctcagacttcacaaattcataaaaaagacagccacatcaaagggcaacagcgttatgtaccgcacaaacgcatgaacaacgcctttatgatgcacgcctccaccagcccgttctatccgctgtttgccgcactggatatcaacgccaaaatgcatgaaggtgtcagcggtcgtaatatgtggatggattgtgtggtaaatggcattaatgcccgcaaactgatcctcgataactgtcagcatattcgtccgttcgtacctgaactggtggatggtaaaccctggcagtcgtatgaaacagcgcaaattgcggttgatctgcgcttcttccagtttgtaccaggggaacactggcattcttttgaaggctatgcagagaatcaatactttgtcgatccatgcaaactgttgctgacaaccccaggtattgatgcacgtaacggcgaatatgaagcgttcggtgtacccgcgacgattcttgctaacttcctgcgcgaaaatggcgtagtgccggaaaaatgcgatcttaactccatcctcttcctgctgactccggcagaagatatggccaaacttcagcaacttgttgccctgctggtacgcttcgaaaaactgcttgagtccgacgcgccattagcagaagtgctaccttccatctacaaacagcatgaagagcgctacgccggttataccctgcgtcagttgtgtcaggaaatgcatgatttgtatgcccgccacaacgtgaaacaactgcaaaaagagatgttccgtaaggagcacttcccacgcgtcagcatgaatccgcaagaagccaactacgcctatttacgcggtgaagtggaactggttcgtctgccggatgcagaaggccgtatcgctgccgaaggtgcgcttccttatcctccgggtgtgctgtgtgttgttccgggtgaaatctggggtggtgctgttctgcgttacttcagcgctctggaagaagggatcaacctgctgccaggttttgcaccggagctgcagggtgtctatatcgaagaacatgatggtcgtaagcaagtttggtgctatgtcatcaagcctcgtgatgcgcaaagcaccctgttgaaaggggaaaaattatga

SEQ ID NO: 157420 - protein, 732 aa, Escherichia coli B
MSKLKIAVSDSCPDCFTTQRECIYINESRNIDVAAIVLSLNDVTCGKLDEIDATGYGIPVFIATENQERVPAEYLPRISGVFENCESRREFYGRQLETAASHYETQLRPPFFRALVDYVNQGNSAFDCPGHQGGEFFRRHPAGNQFVEYFGEALFRADLCNADVAMGDLLIHEGAPCIAQQHAAKVFNADKTYFVLNGTSSSNKVVLNALLTPGDLVLFDRNNHKSNHHGALLQAGATPVYLETARNPYGFIGGIDAHCFEESYLRELIAEVAPQRAKEARPFRLAVIQLGTYDGTIYNARQVVDKIGHLCDYILFDSAWVGYEQFIPMMADCSPLLLDLNENDPGILVTQSVHKQQAGFSQTSQIHKKDSHIKGQQRYVPHKRMNNAFMMHASTSPFYPLFAALDINAKMHEGVSGRNMWMDCVVNGINARKLILDNCQHIRPFVPELVDGKPWQSYETAQIAVDLRFFQFVPGEHWHSFEGYAENQYFVDPCKLLLTTPGIDARNGEYEAFGVPATILANFLRENGVVPEKCDLNSILFLLTPAEDMAKLQQLVALLVRFEKLLESDAPLAEVLPSIYKQHEERYAGYTLRQLCQEMHDLYARHNVKQLQKEMFRKEHFPRVSMNPQEANYAYLRGEVELVRLPDAEGRIAAEGALPYPPGVLCVVPGEIWGGAVLRYFSALEEGINLLPGFAPELQGVYIEEHDGRKQVWCYVIKPRDAQSTLLKGEKL

SEQ ID NO: 157421 - DNA, 2274 bp, Pseudomonas putida GB-1
  CDS (1)..(2274): transl_table=11
atgtccttcggaggtagccacctgatgtacaaggacctcaagttcccgatcctcatcgtccaccgggctatcaaggctgacagtgtcgccggggagcgcgtgcggggcatcgccgaggaactgcgccaggacggtttcgccattctggccgccgccgaccacgccgaagcgcgcctggttgccgccactcaccacggcctggcctgcatgctgattgccgccgaaggagttggcgaaaacacccacctgctgcagaacatggccgagctgatccgcctggcgcgcatgcgcgcgcccgacttgccgatcttcgccttgggcgagcaggtgaccctggaaaacgcccctgccgaagccatgagcgagctcaaccaactgcgtggcatcctttacctgttcgaagacaccgtgccgtttctcgcccgccaggtggcgcgtgccgcacacacctaccttgacggtctgctgccaccgttcttcaaggccctggtgcagcataccgcgcagtccaactattcctggcataccccgggccatggcggtggcgtggcctatcataaaagcccggtaggccaggccttccaccagttcttcggggaaaacaccctgcgctcggacctgtctgtttcagtgccggagctgggctcgctgctcgaccacacaggccccttggccgaagccgaggccagggcggcgcgcaacttcggtgccgaccacaccttcttcgtcatcaatggcacctccacagccaacaagattgtctggcacgccatggtcggtcgcgacgacctggtgttggtggaccgcaactgccataagtcagtggtgcacgcgatcatcatgaccggcgccattccgctgtacctgtgcccagagcgcaacgagctgggcatcatcggcccgatcccgctcagcgagttcagccccgaggcaatcgaggcgaagatccaggccaacccccttgcccatggccgtgggcaacgtatcaagctggcggtagtgaccaactccacctatgacgggctgtgctaccacgccgggatgatcaagcaggccctgggtgccagcgtggaagtactgcacttcgacgaggcctggttcgcttatgcggcgtttcacggcttcttcaccgggcgctatgccatgggcactgcctgcgcagccgacagcccgttggtgttcagcacccattccacccacaagctgctggcggcgttcagccaggcctcgatgatccatgtgcaggacggggccaggcggcagctggaccgggaccgcttcaacgaagcgttcatgatgcatatctcgacttcgccgcagtacagcatccttgcctcgctggacgtggcctcgaccatgatggaagggcaggccgggcattcgctgttgcaagaaatgttcgatgaggcgctgagttttcgtcgtgccctggccaacctgcgcgagcacattgctgcggatgactggtggttcagtatttggcagccgcccagcactgaaggcatccagcccttggccgcgcaggactggctgctgcagccgggggcgcagtggcatggctttggtgaggtggcggacggctacgtgttgctcgaccctctgaaggtgaccctggtaatgccggggctgagtgcgggcggtgtgctgggtgagcgtggcatcccggcggcggtggtcagcaagtttctctgggagcgcgggctggtggtggaaaaaaccggcttgtacagcttcctggtgctgttttccatgggcatcaccaagggcaagtggagcaccttgctcaccgaactgctggagttcaagcgccactatgacggcaatacaccgctgagcagttgcctgccgagtgtgggggttgccgatgcctcacgctaccggggcatgggcctgcgcgacctgtgtgaacagttgcatgactgctaccgtgccaatgccacggccaagcagctgaagcgggtgttcacgcgtttgccggaggtggccgtgagccccgctcgggcttatgaccagatggtacgtggcgaggtggaagcggtgccgatcgaagctttgctgggccgtgtggccgcggtgatgctggtgccgtacccgcccggtattccgttgatcatgccgggagagcggttcaccgaggcgacccgctcgatacttgactacttggccttcgcccgagccttcaaccaaggctttccggggtttgtcgcggatgttcacggcctgcagaacgaaaatggccgctacaccgtggattgcatcatggaatgcgagtga

SEQ ID NO: 157422 - protein, 757 aa, Pseudomonas putida GB-1
MSFGGSHLMYKDLKFPILIVHRAIKADSVAGERVRGIAEELRQDGFAILAAADHAEARLVAATHHGLACMLIAAEGVGENTHLLQNMAELIRLARMRAPDLPIFALGEQVTLENAPAEAMSELNQLRGILYLFEDTVPFLARQVARAAHTYLDGLLPPFFKALVQHTAQSNYSWHTPGHGGGVAYHKSPVGQAFHQFFGENTLRSDLSVSVPELGSLLDHTGPLAEAEARAARNFGADHTFFVINGTSTANKIVWHAMVGRDDLVLVDRNCHKSVVHAIIMTGAIPLYLCPERNELGIIGPIPLSEFSPEAIEAKIQANPLAHGRGQRIKLAVVTNSTYDGLCYHAGMIKQALGASVEVLHFDEAWFAYAAFHGFFTGRYAMGTACAADSPLVFSTHSTHKLLAAFSQASMIHVQDGARRQLDRDRFNEAFMMHISTSPQYSILASLDVASTMMEGQAGHSLLQEMFDEALSFRRALANLREHIAADDWWFSIWQPPSTEGIQPLAAQDWLLQPGAQWHGFGEVADGYVLLDPLKVTLVMPGLSAGGVLGERGIPAAVVSKFLWERGLVVEKTGLYSFLVLFSMGITKGKWSTLLTELLEFKRHYDGNTPLSSCLPSVGVADASRYRGMGLRDLCEQLHDCYRANATAKQLKRVFTRLPEVAVSPARAYDQMVRGEVEAVPIEALLGRVAAVMLVPYPPGIPLIMPGERFTEATRSILDYLAFARAFNQGFPGFVADVHGLQNENGRYTVDCIMECE

SEQ ID NO: 157423 - DNA, 2163 bp, Serratia liquefaciens
  CDS (1)..(2163): transl_table=11
atgaaaaagttaaaaattgccgctaatgaaaaaacactgggctgctttgaaacagaacgtgaaattgtcgatgtgcatcagagcgatttcaatgatgtcgccgccattgtgctgtccgttgaggacgttgcaaagggcatggtgacgcatctcgaagagatcggattgaacatcccgctgtttgtggcggtttgctgcgaagaagagttggacaatgccgtattaccggcgctgcacggggtatttgaactgtgcgggaaaaacacccagttctacggcaagcagttggaggccgcggcggtaaaatatgaaaaagatctgctgccaccgttcttcaacacgctgacgcagtatgtcgaaatgggtaacgccacctttgcctgtccgggccatcagggcggtgaattcttccgtaaacatccggccggacgtcagttctttgatttctatggcgagacgctgttccgttccgatatgtgcaacgcggacgtcaaactgggcgacttattgatccacgaggggctcccctgtgccgcgcagcaacacgcagccaaggtctttaacgccgataagacctatttcgtgctgaatgggacctcggcatcaaacaaagttgcgaccaacgccctgttaacacgcggcgatttagtgttgttcgaccgtaataaccataaatccaatcaccatggcgctctgattcaagctggcgcaacgccggtgtatctggagaccgcccgcaacccatttggctttatcggcggtattgatgcgcactgctttgatgaacgttatttacgtcagcaaatccgcgaagtggcgccggagcgtgccaatgaggcccggcctttccgtctggcaatcatccagttaggcacctacgacggtaccatttacaacgctcgccaggtggtcgacaagattgggcacctgtgcgattacatcctgtttgactccgcctgggtgggctacgaacaattcatcccaatgatgaaagattgttcgcctttactgcttgaactgaatgaaaacgacccggggatcattgtgacccagtccgttcacaaacagcaggccggcttctcgcaaacctcacaaatccataaaaaagacaaacatatcaaaggccaaagtcgctattgcaaccataaacgctttaacaacgcttttatgctgcatgcttccaccagcccgttctatccgctgtttgccgctctggacgtcaatgccaaaatgcatgaagggaaaagcggtcagcgcctgtggaaggagtgcgttcgcgtagggattgaagcccgtaaaatgctgctggagacctgccagttaatcaaaccttttgttccagaccagatcgacggcaagccctggcagtcttatgacaccgagacaatggccaacgatttgcgcttcttcaactttgtgccaggcgagaagtggcatgcctttgaaggctatgcggaatcgcagtattttgtcgacccttgcaagctgttgctcaccacgccgggcatagacacggcgagcggtaactacagtgacttcggcattccggcgaccattttggccaactatctgcgcgaaaacggcatagtaccggaaaaatgcgatctcaactcgatcctgttccttctcacgccggccgaagacatcgccaaaatgcagcatctggtggcgctgattgcccgctttgaaaaacacatcgagcaggattcattactcagtgaagtcctgcccgcggtatataaaagcaatgagcaacgctacaagaattataccctgcgtcaactttgccaagaaatgcacgatctctatgtcagttacgatgttaaagaactgcaaaaagagatgttccgcaagaattatttccctcgtatcgccatgaacccgcaagatgccaatacagaatttgtccgcggcaatatcgaattggtttcattggccaaggctgagggccgtattgcggcagagggtgcactgccttaccctccgggtgttttatgtgtcgtccctggagaaatatggggcggcgctgcacagcgttatttcctggcattggaggaaggcattaatttacttcctggtttcgcaccggaattgcagggtgtttatatccaacaagatgaagatggctggaatcgcgcttacggctacgtcatgagtaattaa

SEQ ID NO: 157424 - protein, 720 aa, Serratia liquefaciens
MKKLKIAANEKTLGCFETEREIVDVHQSDFNDVAAIVLSVEDVAKGMVTHLEEIGLNIPLFVAVCCEEELDNAVLPALHGVFELCGKNTQFYGKQLEAAAVKYEKDLLPPFFNTLTQYVEMGNATFACPGHQGGEFFRKHPAGRQFFDFYGETLFRSDMCNADVKLGDLLIHEGLPCAAQQHAAKVFNADKTYFVLNGTSASNKVATNALLTRGDLVLFDRNNHKSNHHGALIQAGATPVYLETARNPFGFIGGIDAHCFDERYLRQQIREVAPERANEARPFRLAIIQLGTYDGTIYNARQVVDKIGHLCDYILFDSAWVGYEQFIPMMKDCSPLLLELNENDPGIIVTQSVHKQQAGFSQTSQIHKKDKHIKGQSRYCNHKRFNNAFMLHASTSPFYPLFAALDVNAKMHEGKSGQRLWKECVRVGIEARKMLLETCQLIKPFVPDQIDGKPWQSYDTETMANDLRFFNFVPGEKWHAFEGYAESQYFVDPCKLLLTTPGIDTASGNYSDFGIPATILANYLRENGIVPEKCDLNSILFLLTPAEDIAKMQHLVALIARFEKHIEQDSLLSEVLPAVYKSNEQRYKNYTLRQLCQEMHDLYVSYDVKELQKEMFRKNYFPRIAMNPQDANTEFVRGNIELVSLAKAEGRIAAEGALPYPPGVLCVVPGEIWGGAAQRYFLALEEGINLLPGFAPELQGVYIQQDEDGWNRAYGYVMSN

SEQ ID NO: 157425 - DNA, 2181 bp, Vibrio harveyi
  CDS (1)..(2181): transl_table=11
atgaaacgtttaattatcggtgttagtaattacatgccagaagacttcagtttattatctgaatctttggatgagcaatttaaccgaactttaaaaccacttgagcacgtcgaattaactgacgttggcgctgcaattattacttctgcagatattaaggctggtctacacaaaattatttctgaaacgggttatggcattccggttttcttggtcacagatgaaaacccagtttcagcagaagattacgtatggttaaccggcgttatcgatttggaaagacagtcaattgaatactacggtcgccaaatcaatgaggctgtcaccaaatacgaatgtcgcctacttccacctttcttcaaacaattgactcactacgtggaaatgggcaactctgcattcgactgtccaggacaccaaggcggccagttcttcaaaaaacacccagcaggtaaacagttctacgatttcttcggtgaaaacctattccgtagtgacttgtgtaacgcggacgttgatttaggtgacttgctgatccacgaaggttctgctcaccaagctcaagcacacgcagcaaaagtgttcaactcagacaaaacctacttcgtacttaacggcacttcggcttcaaacaaagtggtttgtaacgcgttagtgaccgaaggtgacttggtgatgtttgaccgtaacaaccacaaatcaaaccaccacggtgcattgatccaagcgggcggtatgccggtttacctagaaacggcacgtaacccttggggttttatcggtggtatggatgagcactgttttgatgaagaatacatccgtgctcaaattgcgaaagtgtcaccagagcgtgctcgtgatgaacgtccattccgtcttgcgatcatccaattaggtacttacgacggtaccatctacaacgcacgttacgtgatggataagattggtcatctatgtgactacatcctattcgactcggcatgggtgggctacgagcagttcattcctatgatgaaagactgttctccactgctactggatctgaaaccagaagatgcgggtgtgattgtgactcagtctgttcacaagcaacaagcaggcttctctcaaacctcgcaaatccacaaaaaagaccaccatatcaaaggtcaagctcgctactgtaaccacaaacgcttcaacaacgcgtttatgatgcacgcgtcaacttcaccattctacgcgctgttctcagcattggatgtgaacgcgaagattcacgacggtgaagcgggtctgcgcctatggcgtgatgcggttaagacgggtatcgaagcacgtaaagaaatcctgaaaagctgtgagttgattcgtccgttcattcctgaccaagttgatggtcaaccatggggcagttacgacaccgatcttatcgcaactaataagaagttcttcatgttcgagccagacgcaagctggcataaatttgaaggctacggcgaaggtcagtacttcgttgacccatgtaaattgctactcactacagcaggtattgctgaagatggtagctacgcagactttggtattcctgcaacgttattggctaacttcctacgtgagaacggcatcatccctgagaagtgtgacttgaactctatcttgttccttctcactccagcagaggacatgggtaagatccgtcatcttgtggcgcaaattaaccgtttcgagaaattcattcgtgatgatgcgccgctaaacatcgtgcttcctcgcgtttacgaagcgaacaaagaacgctaccgcggttacaccatccgtcagctatgtcaggaaatgcatgacatgtacaaagagctgaacgtgaaacagctacaaaaagcgatgttccgtagcgaatacttcccaactatggtgcacaaaccagatgtggcaacacgcaaatacttccgcggcgagtgtgattacttgcctctgaaagaagcggtaggtcgtgtcgcagcagaaggtgcgcttccttaccctccaggcattatctgtgtgatcacgggcgaaatctggactcaacaagtggtcgattacttcttatctctagaagaaggcatcaaccgattcccaggcttcgcaccagagattcaaggtgtgtacctagaagacgtcaatggtcgcaccaccgcccattgctacgcccttaaagattaa

SEQ ID NO: 157426 - protein, 726 aa, Vibrio harveyi
MKRLIIGVSNYMPEDFSLLSESLDEQFNRTLKPLEHVELTDVGAAIITSADIKAGLHKIISETGYGIPVFLVTDENPVSAEDYVWLTGVIDLERQSIEYYGRQINEAVTKYECRLLPPFFKQLTHYVEMGNSAFDCPGHQGGQFFKKHPAGKQFYDFFGENLFRSDLCNADVDLGDLLIHEGSAHQAQAHAAKVFNSDKTYFVLNGTSASNKVVCNALVTEGDLVMFDRNNHKSNHHGALIQAGGMPVYLETARNPWGFIGGMDEHCFDEEYIRAQIAKVSPERARDERPFRLAIIQLGTYDGTIYNARYVMDKIGHLCDYILFDSAWVGYEQFIPMMKDCSPLLLDLKPEDAGVIVTQSVHKQQAGFSQTSQIHKKDHHIKGQARYCNHKRFNNAFMMHASTSPFYALFSALDVNAKIHDGEAGLRLWRDAVKTGIEARKEILKSCELIRPFIPDQVDGQPWGSYDTDLIATNKKFFMFEPDASWHKFEGYGEGQYFVDPCKLLLTTAGIAEDGSYADFGIPATLLANFLRENGIIPEKCDLNSILFLLTPAEDMGKIRHLVAQINRFEKFIRDDAPLNIVLPRVYEANKERYRGYTIRQLCQEMHDMYKELNVKQLQKAMFRSEYFPTMVHKPDVATRKYFRGECDYLPLKEAVGRVAAEGALPYPPGIICVITGEIWTQQVVDYFLSLEEGINRFPGFAPEIQGVYLEDVNGRTTAHCYALKD

SEQ ID NO: 157427 - DNA, 2145 bp, Erwinia amylovora
  CDS (1)..(2145): transl_table=11
atgactcctttaaaaattgcagccagtactaccgtggctattcaccttcgcaccgggcgtgaagttgttacgctggataacactgattttaccgacgtggcggcagtggtgctttccgtcagtgactctcgatccggcatgttggcgctgttgcgccataccggttttaagctgccggtatttattgcgttggacgatatctcgcaggcggtggacttaccgcaggttgatggcgtgctggacggtgatgctaatgatgctgcgctgctggaatccgcggctgcggagtaccagtcaaagctgctgccaccgttttttcagacgctgactaaatatgtcgcgatggagaacagcacgtttgcctgcccgggccaccagggcggtgcctttttcaaaaagcatccggcgggacgccagtttttcgacttcttcggtgaaaatgtttttcgtgccgatatgtgcaacgccgatgtgaaactgggtgatttactgatccacgaaggttcggctaaacatgcgcagaagtttgccgcacgggtatttaatgccgataagacctactttgtgctgaacgggacttccagcgctaacaaagtggtgaccaatgcgctgctgacgcgtggcgatctggtattgtttgaccgcaacaaccacaaatccaaccatcatggtgcgctaatccaggcgggagccacacctgtttatcttgaaaccgcacgcaatccgttcggttttatcggtggtatcgatgcgcactgctttgatgaaacctggatccgtcagcaaattgcccgggtagcagcggatcgtgccgatgatgcacgcccgttccgcctggcggtgatccagcttggcacctatgacggtacggtatataacgcacgtaaggtgatcgacagcattggccacctgtgcgactacattctgtttgactcggcatgggtcggttatgagcagtttattccggtgatggaagcctgttccccgttgctgctcgacctgcaacccgccgatcccggtattttcgtcacgcaatcggtgcacaagcagcaggccgggttctcacagacctctcagatccataaaaaagataatcatatacgcgggcagcgacgtttttgcagccataagcgcctgaataacgcctttatgctgcatgcctctaccagccctttctatccgctgtttgccgcgctggatattaacgccaaaatacatcagggtgaggctggccggcgcttgtggcatgaatgtgtgatgctgggtattgatacgcgtaaagccattcttgagcactgcgcaatgattaagccgtttatacctgacgaagttgacgggcagccttggcaaaacgcgcctggcgcgataatcgccagcgatgcgcgctattttagctttgccccaggcgcgcagtggcatggttttgctggctatgaaaaggatcagtacatggtcgatccctgtaagctgctgctaaccacgccgggcattaacgccgccagcggtgaatacgcgtcgtttggtattccggccactattctggccaactatctgcgcgagaatggcgtggtaccggagaagtgcgatctgaactccattctgttcctgctaaccccggcggagagcgcagagaagatggcccggctggtggcgaagctggcgcagtttgagcagcacatcaaagaggatgcgttgctacgcgatgtgctgccgaccatctatcgtaaaaatgcggcgcgttatgaaggttacaccttgcgccgtctgtgccaggagatgcacgacctgtatgtcagccacaaggtaaaagacctgcaaaaggcgatgttccgccaacaaagtctgccccaaattgccatgaacccgcaggacgccaatatcgaatttatccgcggcaacgtcgaactggtacccatttcacaggctgcggggcgtgttgcggcagaaggcgcactgccttatccaccgggcgtgctgtgtgtggtacctggcgagatatggggcggggcggttcagcgttactttttggcgttggaagaggggctaaatctgctgccgggcttctcaccggagttgcagggcgtctatgcggtagccgatgaaaagggcattaagcacctgcagggttatgtgatcgttgaatag

SEQ ID NO: 157428 - protein, 714 aa, Erwinia amylovora
MTPLKIAASTTVAIHLRTGREVVTLDNTDFTDVAAVVLSVSDSRSGMLALLRHTGFKLPVFIALDDISQAVDLPQVDGVLDGDANDAALLESAAAEYQSKLLPPFFQTLTKYVAMENSTFACPGHQGGAFFKKHPAGRQFFDFFGENVFRADMCNADVKLGDLLIHEGSAKHAQKFAARVFNADKTYFVLNGTSSANKVVTNALLTRGDLVLFDRNNHKSNHHGALIQAGATPVYLETARNPFGFIGGIDAHCFDETWIRQQIARVAADRADDARPFRLAVIQLGTYDGTVYNARKVIDSIGHLCDYILFDSAWVGYEQFIPVMEACSPLLLDLQPADPGIFVTQSVHKQQAGFSQTSQIHKKDNHIRGQRRFCSHKRLNNAFMLHASTSPFYPLFAALDINAKIHQGEAGRRLWHECVMLGIDTRKAILEHCAMIKPFIPDEVDGQPWQNAPGAIIASDARYFSFAPGAQWHGFAGYEKDQYMVDPCKLLLTTPGINAASGEYASFGIPATILANYLRENGVVPEKCDLNSILFLLTPAESAEKMARLVAKLAQFEQHIKEDALLRDVLPTIYRKNAARYEGYTLRRLCQEMHDLYVSHKVKDLQKAMFRQQSLPQIAMNPQDANIEFIRGNVELVPISQAAGRVAAEGALPYPPGVLCVVPGEIWGGAVQRYFLALEEGLNLLPGFSPELQGVYAVADEKGIKHLQGYVIVE

SEQ ID NO: 157429 - DNA, 2238 bp, Oenococcus oeni
  CDS (1)..(2238): transl_table=11
atggatagcgaaataaatgatgattcagttcaccaaaccaacttaccgcataagttttcaacggatgagttaaagattgcttctacagcgcatgccacagcgtattttgatacgaatcgtacagttgttgatgctgacaattctgactttgtggatgttgcggctgttgtcgtaatggatgatgaaaaagccatcattaataaggctgatgaaacaaagttcaatattccaatctttatcattacagacgacagttcaaaagtcgacggggagacaatgtcaaagatttttcacatcattgattggcataataattatgatcgccgattatatgatagagaaattgaagcagcagctaaaaaatatgaagatggtgttttacctccattctttaaagctttaaaagcttatgttgaacgagggaacattcaatttgattgtcctggacaccaaggtggacaatatttccgtaagtcaccagcgggacgagaattttataacttttatggggaaaatatttttcgatctgacatttgtaatgccgatgttgatttaggcgatcttttaattcatgaaggaccagcaatggatgctgaaaaacatgcagcacgagtgttcaatgctgacaaaacatattttgttatgaatggaaccacaacttctaataacattgccattacggccgctgttgcaccaggtgatttggtattatttgatcgtaataatcataagtcagtatacaatgcagctttggtacaagcaggtggcagaccagtttatttagagacatctcgtgattcctacggatttattggtggcatctactctaaagattttgatgaaaagtctattcgtgaaaagattgcaaaagttgaccctgaaaaagctaaggctaagagaccattcagattggctgttattcaattaggaacttatgatggcacaatttataatgccaaacaagttgttgaacggataggtcatttatgcgattacattctttttgattcagcttgggttggatatgaacaatttattcctatgatgaaagattcttcgccattattactaaacttggggcccgatgatcctggaattcttgttacgcagtctacacataaacaacaagctggattttcacaagcttcccagattcataaaaaagattcacacattaaagggcagaaacgctacatcaaccacaaacagtttaacaacgcatatatgaagttttcttcaacttcaccattttacccactatttgcaactctagatattaatgcaaagatgcaggagggtgaagctggtaaaaagctatggcatgatgcactggtcacttctgtaaatgctcgtaagaatttattaaaaaatgccacgatgattaaaccatttcttccacctgttgttcatggtaaaccttggcaggatgcggatacggaaaagattgttagcgacattgattattggaaatttgaaaaaggtgctaaatggcatggatttgatggatatgctgacaatcagtattttgttgatccaaataagtttatgttaacaacccctgggattgatgttgaaactggtgaatatgaagattttggtattccagcagttattttagcaaattatttgcgtgaacatggtattattccagaaaaaaatgatttgaattcaattttattcttaatgacacctgcagaaactcaagcaaaaatggataatttggttacacaaattgttaaatttgaatcattagtaaaagctgatgctccgttagatgaagtcctaccacgtctatattcagaacaccaggatagatatgaaggatataccattaagcaactttgccaagaggttcatgacttttataagaacaataatactaaagaatatcagaaggagatgttcttgggtaagtatttcccagaacaagcaatgacaccatatcaagctaatgttgagttgcttaaaaacaatgctaagttagttccgttaactgatattgaaggcttggcagctcttgaaggtgcacttccatatcctccaggaattttctgcatcgtaccaggtgaaaaatggacgaaggttgctcaaaaatactttttaattcttgaagaaagcattaatcgattccctggatttgctccagaaattcaaggggtttacttcgaaaaagaaaacggaaagtcagttgcgtatggttatgtttacgacaagtcaaaagatgaagaaaaaagatga

SEQ ID NO: 157430 - protein, 745 aa, Oenococcus oeni
MDSEINDDSVHQTNLPHKFSTDELKIASTAHATAYFDTNRTVVDADNSDFVDVAAVVVMDDEKAIINKADETKFNIPIFIITDDSSKVDGETMSKIFHIIDWHNNYDRRLYDREIEAAAKKYEDGVLPPFFKALKAYVERGNIQFDCPGHQGGQYFRKSPAGREFYNFYGENIFRSDICNADVDLGDLLIHEGPAMDAEKHAARVFNADKTYFVMNGTTTSNNIAITAAVAPGDLVLFDRNNHKSVYNAALVQAGGRPVYLETSRDSYGFIGGIYSKDFDEKSIREKIAKVDPEKAKAKRPFRLAVIQLGTYDGTIYNAKQVVERIGHLCDYILFDSAWVGYEQFIPMMKDSSPLLLNLGPDDPGILVTQSTHKQQAGFSQASQIHKKDSHIKGQKRYINHKQFNNAYMKFSSTSPFYPLFATLDINAKMQEGEAGKKLWHDALVTSVNARKNLLKNATMIKPFLPPVVHGKPWQDADTEKIVSDIDYWKFEKGAKWHGFDGYADNQYFVDPNKFMLTTPGIDVETGEYEDFGIPAVILANYLREHGIIPEKNDLNSILFLMTPAETQAKMDNLVTQIVKFESLVKADAPLDEVLPRLYSEHQDRYEGYTIKQLCQEVHDFYKNNNTKEYQKEMFLGKYFPEQAMTPYQANVELLKNNAKLVPLTDIEGLAALEGALPYPPGIFCIVPGEKWTKVAQKYFLILEESINRFPGFAPEIQGVYFEKENGKSVAYGYVYDKSKDEEKR

SEQ ID NO: 157431 - DNA, 2220 bp, Hafnia alvei
  CDS (1)..(2220): transl_table=11
atgaatatcattgccatcatgaacgatttaagcgcttattttaaggaagaacccctgcgcgagctgcatcaagagttagagaaggaaggcttccgtattgcttatcccaaagaccgcaacgatctgctgaagctgattgaaaacaactcccgcctgtgtggcgtcattttcgactgggataaatataacctcgaactcagcgctgaaatcagcgagctcaacaaactgctgccaatttatgccttcgccaatacctattcgacgcttgacgtcaacatgagcgacctgcgtcttaatgttcgcttctttgaatatgcattaggcagcgcgcaagacattgccaccaagatccgccaaagcaccgatcagtatattgataccattctgccaccgctgaccaaggcgctgttcaaatacgtcaaagaagagaaatacacagtctgtacgccggggcatatgggcggaactgcgttcgataaaagccctgtcggtagcctgttctatgatttcttcggtgaaaacaccatgcgttcggatatctcgatctccgtatctgagctcggatcgctgctcgatcatagcggcccacaccgtgacgccgaagagtatatcgcgcgcacgttcaacgccgatcgcagctatatcgtaaccaacggaacatctacggcgaataaaattgtcggcatgtattcatctcctgccggtgccactattctgatagaccgtaactgccataaatcattgacccatttgatgatgatgagcaacgttgtccccgtctatctgcgcccaacccgtaacgcctacggcattttaggcgggataccgcaaagcgagttcacccgcgccagcattgaagagaaagtgaaaaatacgcccaatgcgacatggccggtgcatgcggtagtcaccaactctacctatgacggcctgttctacaataccgaatacatcaaaaacacgcttgatgttaagtcgattcacttcgattcggcatgggtgccttacaccaacttccatccgatttaccaaggcaaagcagggatgagcggtgaacgtgtgccggggaaaatcatctacgagactcagtccacccacaaactgctggcggcattctcgcaggcatcgatgatccacgtgaaaggtgagatcaacgaagaaaccttcaatgaagcctatatgatgcatacctcaacatcaccgcattacgggatcgttgcgtcgacggaaaccgcggcggctatgatgaagggcaacgccggtaagcgtttaattaacggttcaattgaacgagcgatccgcttccgtaaagagatccgccgcttacgtacagaatctgatggctggttctttgacgtatggcagccggataacattgacgaggttgcttgctggccactcaatccacgtaatgaatggcatggattcccgaacatcgacaacgatcatatgtatcttgatccgatcaaagtcactctgctgaccccaggtttaagccccaatggcactctggaagaggaagggataccggcgtcgatcgtgtcgaaatatctggatgagcacggcatcatcgtggaaaaaaccgggccatataacctgctcttcctgtttagtatcgggatcgataaaaccaaggcgttgagcttgttgcgggcattaaccgatttcaaacgcgtgtatgacctcaacctgcgcgtgaaaaacgtgttgccatcgctctataacgaggcgcctgatttctataaagagatgcgaattcaggagttggctcaggggattcatgctctggtgaaacaccacaatctaccagacctgatgtatcgtgcatttgaggtattaccaaagctggtgatgacgccgcatgatgcgttccaagaagaagtgcgtggcaatattgagccatgtgccttggatgatatgttagggaaagttagcgccaacatgatcttgccgtatcctccgggtgttccggtggttatgccgggagaaatgctcactaaggagagccgccctgttctgagcttcttgcagatgctatgtgaaattggcgcacactatccgggctttgaaacggatattcacggcgttcatcgtgatggtgcaacgggtaaatacatggtcgtggtgctcaaacaaggcgcagatgaaccgggtgataaaccgagtgatacggtgaagaaagcgccgggtaaaaaaccatcagcggcgaagaagtcataa

SEQ ID NO: 157432 - protein, 739 aa, Hafnia alvei
MNIIAIMNDLSAYFKEEPLRELHQELEKEGFRIAYPKDRNDLLKLIENNSRLCGVIFDWDKYNLELSAEISELNKLLPIYAFANTYSTLDVNMSDLRLNVRFFEYALGSAQDIATKIRQSTDQYIDTILPPLTKALFKYVKEEKYTVCTPGHMGGTAFDKSPVGSLFYDFFGENTMRSDISISVSELGSLLDHSGPHRDAEEYIARTFNADRSYIVTNGTSTANKIVGMYSSPAGATILIDRNCHKSLTHLMMMSNVVPVYLRPTRNAYGILGGIPQSEFTRASIEEKVKNTPNATWPVHAVVTNSTYDGLFYNTEYIKNTLDVKSIHFDSAWVPYTNFHPIYQGKAGMSGERVPGKIIYETQSTHKLLAAFSQASMIHVKGEINEETFNEAYMMHTSTSPHYGIVASTETAAAMMKGNAGKRLINGSIERAIRFRKEIRRLRTESDGWFFDVWQPDNIDEVACWPLNPRNEWHGFPNIDNDHMYLDPIKVTLLTPGLSPNGTLEEEGIPASIVSKYLDEHGIIVEKTGPYNLLFLFSIGIDKTKALSLLRALTDFKRVYDLNLRVKNVLPSLYNEAPDFYKEMRIQELAQGIHALVKHHNLPDLMYRAFEVLPKLVMTPHDAFQEEVRGNIEPCALDDMLGKVSANMILPYPPGVPVVMPGEMLTKESRPVLSFLQMLCEIGAHYPGFETDIHGVHRDGATGKYMVVVLKQGADEPGDKPSDTVKKAPGKKPSAAKKS

SEQ ID NO: 157433 - DNA, 2374 bp, Escherichia coli
  CDS (146)..(2281): transl_table=11
ctgcaggacaacagtaaaatcagagcgtttctgcttttactgatgtctggcggtcggagctggtgaccagtttgacccatatctcatggggcagggttttccaccttgtccggtattcttacttccccgaaacgggtttgcgcttatgaaatcaatgaatattgccgccagtagtgaactggtatcccgactttcttctcatcgtcgcgtggtggcgttgggagatactgattttacggacgtcgcggcagtcgtcattaccgctgcggatagtcgcagtggcattcttgcgttgcttaagcgcaccggttttcatctaccggtgtttttgtattccgaacatgctgttgaattacctgcgggcgttacggcggtaatcaacggcaacgagcagcagtggctggagctggaatccgcagcctgtcagtatgaagagaatttgctgccaccgttttatgacacgctgacgcagtacgttgagatgggcaacagcacctttgcttgccctggacatcaacatggtgcgttttttaaaaagcatcctgccggacgccatttttacgatttctttggtgagaacgtctttcgcgccgatatgtgtaacgctgacgtaaaattgggcgatctgcttattcatgaaggatcggcgaaagatgcgcagaaattcgcagccaaagtctttcatgccgataaaacctattttgtgctgaacggcacatcggcagcgaataaagtggtgacgaatgcgctgttaacgcgtggcgatctggtgctcttcgaccgtaacaaccataagtcgaatcatcacggcgcgctgattcaggcgggggcgacgccggtctatctggaagcttcacgcaacccgtttggtttcattggcggtattgatgcgcactgttttaatgaagagtatctgcgccagcaaattcgcgacgttgcgccagaaaaagccgacctgccgcgcccgtatcgcctggcgattattcagctgggaacctatgacggcactgtctataacgcccgtcaggtgatcgataccgttgggcatctgtgtgattacattctgtttgattccgcgtgggtcggttatgaacaatttatcccgatgatggcggatagctcgccgctgctgttagaacttaacgaaaacgatccggggatctttgtgactcagtcggtgcacaaacagcaggcgggattctcacagacgtcgcagatccataaaaaagataaccatatccgcggacaggcgcgtttttgcccgcataagcggttgaataacgcctttatgctccatgcttctaccagccctttctatccgctgtttgctgcactggatgttaacgccaaaattcatgaaggggagagtgggcgtcggctgtgggctgagtgtgttgagatagggattgaagcgcgcaaggctattcttgcgcgctgtaagctgttccgcccgtttatcccgcccgttgttgatggcaaattgtggcaggattatccgacatcagtgttagccagcgaccgccgttttttcagttttgagccgggggcgaagtggcacggctttgaaggatatgccgcggatcagtattttgttgatccgtgcaagctgttactcactacaccaggtatcgatgccgaaaccggcgaatatagcgactttggcgttccggcgacgattctggcgcactatctgcgtgagaacggcattgtgccggagaagtgcgatctcaactccattctgtttttattaactccggcggaaagccacgagaagctggcacaactggtggcgatgctggcgcaatttgaacagcatattgaggatgactcgccgctggttgaggtgttgccgagcgtttataacaagtatccggtgcgctatcgcgactacaccctgcgccagttgtgtcaggagatgcacgatctgtatgtcagtttcgacgtcaaagacctacaaaaagcgatgttccgccagcagagtttcccgtcagtggtgatgaacccccaggatgcgcatagcgcttatattcgcggtgacgtggagttggtgcggattcgtgatgccgaagggcgaattgcggcagaaggggcgttgccttatccacctggcgtgctttgcgtggtacccggggaagtctggggtggggcggttcaacgttatttccttgcactggaagaaggggtgaatttgttgccgggattttcgccggagctgcaaggtgtttatagcgaaaccgatgcggatggcgtgaaacggttgtacggttatgtgttgaagtaagaataaaaaaaacgggtcaccttctggcgacccgtttttctttgcgtaattagtggctaaccgtctgtgtgcctgtcgggacacgaacgtgtt

SEQ ID NO: 157434 - protein, 711 aa, Escherichia coli
MKSMNIAASSELVSRLSSHRRVVALGDTDFTDVAAVVITAADSRSGILALLKRTGFHLPVFLYSEHAVELPAGVTAVINGNEQQWLELESAACQYEENLLPPFYDTLTQYVEMGNSTFACPGHQHGAFFKKHPAGRHFYDFFGENVFRADMCNADVKLGDLLIHEGSAKDAQKFAAKVFHADKTYFVLNGTSAANKVVTNALLTRGDLVLFDRNNHKSNHHGALIQAGATPVYLEASRNPFGFIGGIDAHCFNEEYLRQQIRDVAPEKADLPRPYRLAIIQLGTYDGTVYNARQVIDTVGHLCDYILFDSAWVGYEQFIPMMADSSPLLLELNENDPGIFVTQSVHKQQAGFSQTSQIHKKDNHIRGQARFCPHKRLNNAFMLHASTSPFYPLFAALDVNAKIHEGESGRRLWAECVEIGIEARKAILARCKLFRPFIPPVVDGKLWQDYPTSVLASDRRFFSFEPGAKWHGFEGYAADQYFVDPCKLLLTTPGIDAETGEYSDFGVPATILAHYLRENGIVPEKCDLNSILFLLTPAESHEKLAQLVAMLAQFEQHIEDDSPLVEVLPSVYNKYPVRYRDYTLRQLCQEMHDLYVSFDVKDLQKAMFRQQSFPSVVMNPQDAHSAYIRGDVELVRIRDAEGRIAAEGALPYPPGVLCVVPGEVWGGAVQRYFLALEEGVNLLPGFSPELQGVYSETDADGVKRLYGYVLK

SEQ ID NO: 157435 - DNA, 2199 bp, Escherichia coli
  CDS (1)..(2199): transl_table=11
atgtcaaaattaaaaattgcggttagtgattcttgcccggactgttttaccacgcagcgagaatgtatctacattaatgaaagtcgtaatatcgatgtggcggcaatagttttatcgctcaacgatgttacatgcggaaaactcgatgaaatcgatgccacgggttatggcatcccggtatttattgctactgaaaatcaagaacgtgtacccgcagagtatttgccccgtatttcgggtgtctttgagaattgcgaatcgcgacgagaattttatggtcgccagttagaaaccgctgccagccattatgaaactcaactgcgcccacctttcttccgcgcactggtcgattatgtcaatcaaggtaacagcgcgtttgattgccctggtcatcagggcggcgaatttttccgtcgccatccggcggggaatcagtttgtggaatactttggtgaggcgctgttccgtgccgacttgtgcaacgccgacgtagcgatgggcgatctgctgattcacgaaggcgcgccatgcattgcacagcaacatgcggcaaaagtgtttaatgccgataaaacctacttcgttttaaatggcacttcatcttctaacaaagtggttttaaacgccctgctaacaccgggtgatctggtgctgtttgatcgcaataaccacaaatctaaccaccacggagcgttgctacaggctggtgcaacaccggtttatctggaaacggcacgtaacccgtatggctttatcggtggcattgatgcgcactgttttgaagaaagttacctgcgtgagctgatcgcggaagtcgcaccgcagcgggcaaaagaggctcgtcctttccgcctcgctgtgattcagttaggcacctacgacggtacgatttataacgcccgccaagtggtggataaaattggtcatctgtgtgactacatcctgtttgactcagcatgggtcggctatgaacagtttattccgatgatggcggactgttcgccgctgttgctggatcttaatgagaacgatccgggtattctggttacgcaatctgtgcataaacaacaggctggtttttctcagacttcacaaattcataaaaaagacagccacatcaaagggcaacagcgttatgtaccgcacaaacgcatgaacaacgcctttatgatgcacgcctccaccagcccgttctatccgctgtttgccgcactgaatatcaacgccaaaatgcatgaaggtgtcagcggtcgtaatatgtggatggattgtgtggtaaatggcattaatgcccgcaaactgatcctcgataactgtcagcatattcgtccgttcgtacctgaactggtggatggtaaaccctggcagtcgtatgaaacagcgcaaattgcggttgatctgcgcttcttccagtttgtaccaggggaacactggcattcttttgaaggctatgcagagaatcaatactttgtcgatccatgcaaactgttgctgacaaccccaggtattgatgcacgtaacggcgaatatgaagcgttcggtgtacccgcgacgattcttgctaacttcctgcgcgaaaatggcgtagtgccggaaaaatgcgatcttaactccatcctcttcctgctgactccggcagaagatatggccaaacttcagcaacttgttgccctgctggtacgcttcgaaaaactgcttgagtccgacgcgccattagcagaagtgctaccttccatctacaaacagcatgaagagcgctacgccggttataccctgcgtcagttgtgtcaggaaatgcatgatttgtatgcccgccacaacgtgaaacaactgcaaaaagagatgttccgtaaggagcacttcccacgcgtcagcatgaatccgcaagaagccaactacgcctatttacgcggtgaagtggaactggttcgtctgccggatgcagaaggccgtatcgctgccgaaggtgcgcttccttatcctccgggtgtgctgtgtgttgttccgggtgaaatctggggtggtgctgttctgcgttacttcagcgctctggaagaagggatcaacctgctgccaggttttgcaccggagctgcagggtgtctatatcgaagaacatgatggtcgtaagcaagtttggtgctatgtcatcaagcctcgtgatgcgcaaagcaccctgttgaaaggggaaaaattatga

SEQ ID NO: 157436 - protein, 732 aa, Escherichia coli
MSKLKIAVSDSCPDCFTTQRECIYINESRNIDVAAIVLSLNDVTCGKLDEIDATGYGIPVFIATENQERVPAEYLPRISGVFENCESRREFYGRQLETAASHYETQLRPPFFRALVDYVNQGNSAFDCPGHQGGEFFRRHPAGNQFVEYFGEALFRADLCNADVAMGDLLIHEGAPCIAQQHAAKVFNADKTYFVLNGTSSSNKVVLNALLTPGDLVLFDRNNHKSNHHGALLQAGATPVYLETARNPYGFIGGIDAHCFEESYLRELIAEVAPQRAKEARPFRLAVIQLGTYDGTIYNARQVVDKIGHLCDYILFDSAWVGYEQFIPMMADCSPLLLDLNENDPGILVTQSVHKQQAGFSQTSQIHKKDSHIKGQQRYVPHKRMNNAFMMHASTSPFYPLFAALNINAKMHEGVSGRNMWMDCVVNGINARKLILDNCQHIRPFVPELVDGKPWQSYETAQIAVDLRFFQFVPGEHWHSFEGYAENQYFVDPCKLLLTTPGIDARNGEYEAFGVPATILANFLRENGVVPEKCDLNSILFLLTPAEDMAKLQQLVALLVRFEKLLESDAPLAEVLPSIYKQHEERYAGYTLRQLCQEMHDLYARHNVKQLQKEMFRKEHFPRVSMNPQEANYAYLRGEVELVRLPDAEGRIAAEGALPYPPGVLCVVPGEIWGGAVLRYFSALEEGINLLPGFAPELQGVYIEEHDGRKQVWCYVIKPRDAQSTLLKGEKL

SEQ ID NO: 157437 - DNA, 20 bp, Artificial sequence
  primer
atggggcagggttttccacc

SEQ ID NO: 157438 - DNA, 25 bp, Artificial sequence
  primer
ttacttcaacacataaccgtacaac

SEQ ID NO: 157439 - protein, 689 aa, Artificial sequence
  consensus sequence
  Variant (2)..(2): Xaa in position 2 is any amino acid
  Variant (4)..(24): Xaa in position 4 to 24 is any amino acid
  Variant (25)..(49): Xaa in position 25 to 49 is any or no amino acid
  Variant (51)..(53): Xaa in position 51 to 53 is any amino acid
  Variant (55)..(55): Xaa in position 55 is any amino acid
  Variant (60)..(61): Xaa in position 60 to 61 is any amino acid
  Variant (63)..(64): Xaa in position 63 to 64 is any amino acid
  Variant (66)..(74): Xaa in position 66 to 74 is any amino acid
  Variant (79)..(79): Xaa in position 79 is any amino acid
  Variant (82)..(87): Xaa in position 82 to 87 is any amino acid
  Variant (89)..(89): Xaa in position 89 is any amino acid
  Variant (91)..(92): Xaa in position 91 to 92 is any amino acid
  Variant (94)..(97): Xaa in position 94 to 97 is any amino acid
  Variant (100)..(102): Xaa in position 100 to 102 is any amino acid
  Variant (104)..(104): Xaa in position 104 is any amino acid
  Variant (106)..(107): Xaa in position 106 to 107 is any amino acid
  Variant (109)..(112): Xaa in position 109 to 112 is any amino acid
  Variant (115)..(115): Xaa in position 115 is any amino acid
  Variant (118)..(118): Xaa in position 118 is any amino acid
  Variant (120)..(120): Xaa in position 120 is any amino acid
  Variant (122)..(129): Xaa in position 122 to 129 is any amino acid
  Variant (132)..(133): Xaa in position 132 to 133 is any amino acid
  Variant (135)..(135): Xaa in position 135 is any amino acid
  Variant (138)..(140): Xaa in position 138 to 140 is any amino acid
  Variant (143)..(143): Xaa in position 143 is any amino acid
  Variant (148)..(149): Xaa in position 148 to 149 is any amino acid
  Variant (152)..(152): Xaa in position 152 is any amino acid
  Variant (154)..(160): Xaa in position 154 to 160 is any amino acid
  Variant (163)..(163): Xaa in position 163 is any amino acid
  Variant (165)..(166): Xaa in position 165 to 166 is any amino acid
  Variant (170)..(170): Xaa in position 170 is any amino acid
  Variant (174)..(175): Xaa in position 174 to 175 is any amino acid
  Variant (177)..(177): Xaa in position 177 is any amino acid
  Variant (179)..(182): Xaa in position 179 to 182 is any amino acid
  Variant (184)..(185): Xaa in position 184 to 185 is any amino acid
  Variant (188)..(188): Xaa in position 188 is any amino acid
  Variant (190)..(192): Xaa in position 190 to 192 is any amino acid
  Variant (195)..(196): Xaa in position 195 to 196 is any amino acid
  Variant (198)..(198): Xaa in position 198 is any amino acid
  Variant (201)..(206): Xaa in position 201 to 206 is any amino acid
  Variant (208)..(215): Xaa in position 208 to 215 is any amino acid
  Variant (217)..(225): Xaa in position 217 to 225 is any amino acid
  Variant (226)..(234): Xaa in position 226 to 234 is any or no amino acid
  Variant (236)..(242): Xaa in position 236 to 242 is any amino acid
  Variant (247)..(248): Xaa in position 247 to 248 is any amino acid
  Variant (251)..(258): Xaa in position 251 to 258 is any amino acid
  Variant (260)..(260): Xaa in position 260 is any amino acid
  Variant (261)..(262): Xaa in position 261 to 262 is any or no amino acid
  Variant (264)..(266): Xaa in position 264 to 266 is any amino acid
  Variant (269)..(269): Xaa in position 269 is any amino acid
  Variant (272)..(276): Xaa in position 272 to 276 is any amino acid
  Variant (278)..(299): Xaa in position 278 to 299 is any amino acid
  Variant (300)..(302): Xaa in position 300 to 302 is any or no amino acid
  Variant (306)..(306): Xaa in position 306 is any amino acid
  Variant (309)..(310): Xaa in position 309 to 310 is any amino acid
  Variant (313)..(313): Xaa in position 313 is any amino acid
  Variant (316)..(316): Xaa in position 316 is any amino acid
  Variant (320)..(322): Xaa in position 320 to 322 is any amino acid
  Variant (324)..(326): Xaa in position 324 to 326 is any amino acid
  Variant (327)..(330): Xaa in position 327 to 330 is any or no amino acid
  Variant (332)..(336): Xaa in position 332 to 336 is any amino acid
  Variant (338)..(338): Xaa in position 338 is any amino acid
  Variant (340)..(340): Xaa in position 340 is any amino acid
  Variant (342)..(344): Xaa in position 342 to 344 is any amino acid
  Variant (346)..(346): Xaa in position 346 is any amino acid
  Variant (351)..(351): Xaa in position 351 is any amino acid
  Variant (353)..(355): Xaa in position 353 to 355 is any amino acid
  Variant (357)..(358): Xaa in position 357 to 358 is any amino acid
  Variant (361)..(361): Xaa in position 361 is any amino acid
  Variant (363)..(369): Xaa in position 363 to 369 is any amino acid
  Variant (371)..(372): Xaa in position 371 to 372 is any amino acid
  Variant (374)..(384): Xaa in position 374 to 384 is any amino acid
  Variant (386)..(421): Xaa in position 386 to 421 is any amino acid
  Variant (422)..(454): Xaa in position 422 to 454 is any or no amino acid
  Variant (457)..(457): Xaa in position 457 is any amino acid
  Variant (459)..(468): Xaa in position 459 to 468 is any amino acid
  Variant (471)..(471): Xaa in position 471 is any amino acid
  Variant (473)..(476): Xaa in position 473 to 476 is any amino acid
  Variant (480)..(489): Xaa in position 480 to 489 is any amino acid
  Variant (490)..(490): Xaa in position 490 is any or no amino acid
  Variant (492)..(492): Xaa in position 492 is any amino acid
  Variant (495)..(500): Xaa in position 495 to 500 is any amino acid
  Variant (502)..(502): Xaa in position 502 is any amino acid
  Variant (504)..(504): Xaa in position 504 is any amino acid
  Variant (506)..(508): Xaa in position 506 to 508 is any amino acid
  Variant (511)..(512): Xaa in position 511 to 512 is any amino acid
  Variant (514)..(514): Xaa in position 514 is any amino acid
  Variant (516)..(518): Xaa in position 516 to 518 is any amino acid
  Variant (520)..(520): Xaa in position 520 is any amino acid
  Variant (522)..(531): Xaa in position 522 to 531 is any amino acid
  Variant (533)..(538): Xaa in position 533 to 538 is any amino acid
  Variant (540)..(548): Xaa in position 540 to 548 is any amino acid
  Variant (550)..(552): Xaa in position 550 to 552 is any amino acid
  Variant (555)..(561): Xaa in position 555 to 561 is any amino acid
  Variant (562)..(562): Xaa in position 562 is any or no amino acid
  Variant (565)..(569): Xaa in position 565 to 569 is any amino acid
  Variant (571)..(571): Xaa in position 571 is any amino acid
  Variant (574)..(576): Xaa in position 574 to 576 is any amino acid
  Variant (578)..(579): Xaa in position 578 to 579 is any amino acid
  Variant (581)..(587): Xaa in position 581 to 587 is any amino acid
  Variant (589)..(600): Xaa in position 589 to 600 is any amino acid
  Variant (601)..(602): Xaa in position 601 to 602 is any or no amino acid
  Variant (604)..(604): Xaa in position 604 is any amino acid
  Variant (606)..(607): Xaa in position 606 to 607 is any amino acid
  Variant (609)..(626): Xaa in position 609 to 626 is any amino acid
  Variant (629)..(635): Xaa in position 629 to 635 is any amino acid
  Variant (641)..(645): Xaa in position 641 to 645 is any amino acid
  Variant (649)..(656): Xaa in position 649 to 656 is any amino acid
  Variant (657)..(659): Xaa in position 657 to 659 is any or no amino acid
  Variant (661)..(671): Xaa in position 661 to 671 is any amino acid
  Variant (675)..(679): Xaa in position 675 to 679 is any amino acid
  Variant (681)..(685): Xaa in position 681 to 685 is any amino acid
  Variant (686)..(688): Xaa in position 686 to 688 is any or no amino acid
PXFXXXXXXXXXXXXXXXXXXXXXXXXXXXXXXXXXXXXXXXXXXXXXXYXXXLXPPFFXXLXXYXXXXXXXXXCPGHXGGXXXXXXPXGXXFXXXXGEXXXRXDXXNXXXXLGXLLXHXGXXXXXXXXAAXXFXADXXXFVXNGTSXXNKXVXXXXXXXGDXVXXDRNXHKSXXHXAXXXXGXXPVXLXXXRNXXGXIGXXXXXXFXXXXXXXXIXXXXXXXXXXXXXXXXXXRXXXXXXXTYDGXXYNXXXXXXXXGXXXDXXXFDXAWXXXXXFXXXXXXXXXXXXXXXXXXXXXXXXXTQSXHKXXAGXSQXSQIXXXDXXXXXXXRXXXXXRXNXAXXXHXSTSPXYXXXAXXDVXAXXXXXXXGXXLXXXXXXXXXXXRXXXXXXXXXXXXXXXXXXXXXXXXXXXXXXXXXXXXXXXXXXXXXXXXXXXXXXXXXXXXXXXXXXXXXWHXFXXXXXXXXXXDPXKXXXXTPGXXXXXXXXXXXGXPAXXXXXXLXEXGXXXEKXXLXSXXXLXTXXXXXXXXXXLXXXXXXFXXXXXXXXXLXXXLPXXXXXXXXRYXXXXXRXLCXXXHXXYXXXXXXXLXXXXXXXXXXXXXXMXPXXAXXXXXXXXXXXXXXXXXXGRXXXXXXXPYPPGXXXXXPGEXXXXXXXXXXXYXXXXXXXXXXXPGFXXXXXGXXXXXXXXG

SEQ ID NO: 157440 - protein, 60 aa, Artificial sequence
  protein pattern
  Variant (2)..(5): Xaa in position 2 to 5 is any amino acid
  Variant (7)..(7): Xaa in position 7 is Glu or Thr
  Variant (9)..(9): Xaa in position 9 is any amino acid
  Variant (10)..(10): Xaa in position 10 is Ala, Leu, Pro or Val
  Variant (11)..(12): Xaa in position 11 to 12 is any amino acid
  Variant (13)..(13): Xaa in position 13 is Ala or Ser
  Variant (14)..(14): Xaa in position 14 is Glu or Gln
  Variant (15)..(16): Xaa in position 15 to 16 is any amino acid
  Variant (19)..(20): Xaa in position 19 to 20 is any amino acid
  Variant (22)..(22): Xaa in position 22 is any amino acid
  Variant (23)..(23): Xaa in position 23 is Ala, Cys or Ser
  Variant (24)..(24): Xaa in position 24 is Asp or Glu
  Variant (25)..(25): Xaa in position 25 is His, Lys or Arg
  Variant (26)..(26): Xaa in position 26 is any amino acid
  Variant (27)..(27): Xaa in position 27 is Phe or Tyr
  Variant (30)..(30): Xaa in position 30 is any amino acid
  Variant (35)..(35): Xaa in position 35 is Ala, Ser or Thr
  Variant (36)..(36): Xaa in position 36 is Ala or Ser
  Variant (39)..(39): Xaa in position 39 is Ile, Met or Val
  Variant (40)..(40): Xaa in position 40 is Ala or Val
  Variant (41)..(42): Xaa in position 41 to 42 is any amino acid
  Variant (43)..(43): Xaa in position 43 is Ala, Gly, Ser or Thr
  Variant (44)..(44): Xaa in position 44 is any amino acid
  Variant (45)..(45): Xaa in position 45 is Leu or Val
  Variant (46)..(46): Xaa in position 46 is Ala, Gly or Thr
  Variant (47)..(47): Xaa in position 47 is any amino acid
  Variant (48)..(48): Xaa in position 48 is Asp, Glu or Gly
  Variant (50)..(50): Xaa in position 50 is Ile, Leu or Val
  Variant (52)..(52): Xaa in position 52 is Leu, Met or Val
  Variant (53)..(53): Xaa in position 53 is Phe or Val
  Variant (57)..(57): Xaa in position 57 is Cys or Asn
  Variant (60)..(60): Xaa in position 60 is Ala or Ser
GXXXXHXGXXXXXXXXAAXXFXXXXXXFVXNGTSXXNKXXXXXXXXXXDXVXXDRNXHKX

SEQ ID NO: 157441 - protein, 27 aa, Artificial sequence
  protein pattern
  Variant (2)..(3): Xaa in position 2 to 3 is any amino acid
  Variant (4)..(5): Xaa in position 4 to 5 is any or no amino acid
  Variant (7)..(7): Xaa in position 7 is any or no amino acid
  Variant (9)..(9): Xaa in position 9 is any amino acid
  Variant (14)..(14): Xaa in position 14 is any amino acid
  Variant (16)..(16): Xaa in position 16 is Ala, Gly, Pro or Ser
  Variant (17)..(17): Xaa in position 17 is Ile or Leu
  Variant (18)..(18): Xaa in position 18 is Phe or Ile
  Variant (20)..(20): Xaa in position 20 is Ala, Ser or Thr
  Variant (21)..(21): Xaa in position 21 is any amino acid
  Variant (23)..(23): Xaa in position 23 is Ile or Val
  Variant (24)..(24): Xaa in position 24 is Ala, Gly or Asn
  Variant (25)..(25): Xaa in position 25 is Ala or Ser
  Variant (26)..(26): Xaa in position 26 is any amino acid
  Variant (27)..(27): Xaa in position 27 is Ile or Met
NXXXXMXHXSTSPXYXXXAXXDXXXXX

SEQ ID NO: 157442 - protein, 59 aa, Artificial sequence
  protein pattern
  Variant (2)..(2): Xaa in position 2 is any or no amino acid
  Variant (5)..(5): Xaa in position 5 is Phe or Tyr
  Variant (6)..(7): Xaa in position 6 to 7 is any amino acid
  Variant (9)..(10): Xaa in position 9 to 10 is any amino acid
  Variant (11)..(11): Xaa in position 11 is His or Tyr
  Variant (12)..(12): Xaa in position 12 is Ala, Thr or Val
  Variant (13)..(13): Xaa in position 13 is Ala, Asp, Glu, Asn, Gln or Ser
  Variant (14)..(14): Xaa in position 14 is any amino acid
  Variant (15)..(15): Xaa in position 15 is Glu, Gly, Asn or Ser
  Variant (16)..(17): Xaa in position 16 to 17 is any amino acid
  Variant (18)..(18): Xaa in position 18 is Ala, Gln, Ser or Thr
  Variant (19)..(19): Xaa in position 19 is Phe or Trp
  Variant (20)..(20): Xaa in position 20 is any amino acid
  Variant (21)..(21): Xaa in position 21 is Cys or Thr
  Variant (25)..(25): Xaa in position 25 is Gly, Gln or Ser
  Variant (26)..(26): Xaa in position 26 is any amino acid
  Variant (28)..(29): Xaa in position 28 to 29 is any amino acid
  Variant (30)..(30): Xaa in position 30 is Phe or Tyr
  Variant (31)..(31): Xaa in position 31 is any amino acid
  Variant (32)..(32): Xaa in position 32 is Lys or Arg
  Variant (33)..(33): Xaa in position 33 is any amino acid
  Variant (35)..(35): Xaa in position 35 is Ala, Ile, Leu or Val
  Variant (37)..(38): Xaa in position 37 to 38 is any amino acid
  Variant (39)..(39): Xaa in position 39 is Phe or Leu
  Variant (40)..(40): Xaa in position 40 is any amino acid
  Variant (41)..(41): Xaa in position 41 is Asp, Glu, Asn or Gln
  Variant (42)..(43): Xaa in position 42 to 43 is Phe or Tyr
  Variant (46)..(47): Xaa in position 46 to 47 is any amino acid
  Variant (48)..(48): Xaa in position 48 is Phe or Leu
  Variant (50)..(50): Xaa in position 50 is Ala or Ser
  Variant (52)..(52): Xaa in position 52 is Ile, Leu, Met or Val
  Variant (53)..(53): Xaa in position 53 is Cys or Ser
  Variant (54)..(54): Xaa in position 54 is Asn or Val
  Variant (55)..(55): Xaa in position 55 is Ala or Ser
  Variant (56)..(56): Xaa in position 56 is Asp or Val
  Variant (57)..(58): Xaa in position 57 to 58 is any amino acid
  Variant (59)..(59): Xaa in position 59 is Leu or Met
PXPFXXXLXXXXXXXXXXXXXPGHXXGXXXXXXPXGXXXXXXXGEXXXRXDXXXXXXXX

SEQ ID NO: 157443 - protein, 24 aa, Artificial sequence
  protein pattern
  Variant (2)..(2): Xaa in position 2 is any amino acid
  Variant (4)..(4): Xaa in position 4 is Thr or Val
  Variant (7)..(8): Xaa in position 7 to 8 is any amino acid
  Variant (10)..(10): Xaa in position 10 is Gly or Ser
  Variant (11)..(11): Xaa in position 11 is Phe, Ile or Leu
  Variant (14)..(14): Xaa in position 14 is Ala or Thr
  Variant (17)..(23): Xaa in position 17 to 23 is any or no amino acid
TXSXHKXXAXXSQXSQXXXXXXXI

SEQ ID NO: 157444 - protein, 32 aa, Artificial sequence
  protein pattern
  Variant (2)..(2): Xaa in position 2 is any amino acid
  Variant (3)..(4): Xaa in position 3 to 4 is any or no amino acid
  Variant (6)..(10): Xaa in position 6 to 10 is any amino acid
  Variant (11)..(11): Xaa in position 11 is any or no amino acid
  Variant (16)..(17): Xaa in position 16 to 17 is any amino acid
  Variant (19)..(19): Xaa in position 19 is Asp or Asn
  Variant (20)..(20): Xaa in position 20 is Ala or Val
  Variant (21)..(21): Xaa in position 21 is Glu, Lys or Arg
  Variant (22)..(22): Xaa in position 22 is any amino acid
  Variant (23)..(23): Xaa in position 23 is Ile, Leu, Met or Val
  Variant (24)..(24): Xaa in position 24 is any amino acid
  Variant (25)..(25): Xaa in position 25 is Ala, Asp, Glu, Asn or Gln
  Variant (26)..(26): Xaa in position 26 is any amino acid
  Variant (27)..(27): Xaa in position 27 is Ile, Leu or Val
  Variant (28)..(28): Xaa in position 28 is Ala, Asp, Gly or Thr
  Variant (29)..(31): Xaa in position 29 to 31 is any amino acid
  Variant (32)..(32): Xaa in position 32 is Asp or Glu
RXXXLXXXXXXTYDGXXYXXXXXXXXXXXXXX

SEQ ID NO: 157445 - protein, 38 aa, Artificial sequence
  protein pattern
  Variant (2)..(2): Xaa in position 2 is Ile or Val
  Variant (5)..(5): Xaa in position 5 is any amino acid
  Variant (6)..(10): Xaa in position 6 to 10 is any or no amino acid
  Variant (12)..(12): Xaa in position 12 is any amino acid
  Variant (14)..(14): Xaa in position 14 is any amino acid
  Variant (15)..(15): Xaa in position 15 is Gly or Asn
  Variant (16)..(16): Xaa in position 16 is Ile, Leu or Val
  Variant (17)..(17): Xaa in position 17 is Ile or Val
  Variant (18)..(18): Xaa in position 18 is Ile, Pro or Val
  Variant (21)..(21): Xaa in position 21 is Cys or Thr
  Variant (22)..(22): Xaa in position 22 is Asp or Gly
  Variant (23)..(24): Xaa in position 23 to 24 is any amino acid
  Variant (25)..(25): Xaa in position 25 is Asn or Ser
  Variant (26)..(26): Xaa in position 26 is Phe, Ile or Leu
  Variant (27)..(27): Xaa in position 27 is Phe or Leu
  Variant (28)..(28): Xaa in position 28 is Phe, Ile or Val
  Variant (29)..(29): Xaa in position 29 is Leu or Met
  Variant (30)..(30): Xaa in position 30 is Phe, Leu or Met
  Variant (31)..(31): Xaa in position 31 is Ser or Thr
  Variant (32)..(32): Xaa in position 32 is any amino acid
  Variant (33)..(33): Xaa in position 33 is Ala or Gly
  Variant (34)..(34): Xaa in position 34 is any amino acid
  Variant (35)..(35): Xaa in position 35 is Asp, Asn, Ser or Thr
  Variant (36)..(36): Xaa in position 36 is any amino acid
  Variant (37)..(37): Xaa in position 37 is Ala, Glu, Gly or Thr
  Variant (38)..(38): Xaa in position 38 is Lys or Arg
GXPAXXXXXXLXEXXXXXEKXXXXXXXXXXXXXXXXXX

SEQ ID NO: 157446 - protein, 45 aa, Artificial sequence
  protein pattern
  Variant (2)..(7): Xaa in position 2 to 7 is any amino acid
  Variant (8)..(14): Xaa in position 8 to 14 is any or no amino acid
  Variant (16)..(16): Xaa in position 16 is Ile or Val
  Variant (17)..(17): Xaa in position 17 is Ala or Thr
  Variant (18)..(18): Xaa in position 18 is Ala, Gly, Ser or Thr
  Variant (19)..(20): Xaa in position 19 to 20 is any amino acid
  Variant (21)..(21): Xaa in position 21 is Ala, Leu or Val
  Variant (22)..(22): Xaa in position 22 is any amino acid
  Variant (28)..(28): Xaa in position 28 is Ile or Val
  Variant (29)..(30): Xaa in position 29 to 30 is any amino acid
  Variant (31)..(31): Xaa in position 31 is Ile, Leu, Met or Val
  Variant (32)..(32): Xaa in position 32 is Ile, Met or Val
  Variant (33)..(33): Xaa in position 33 is Pro or Thr
  Variant (36)..(36): Xaa in position 36 is any amino acid
  Variant (37)..(37): Xaa in position 37 is Phe or Trp
  Variant (38)..(38): Xaa in position 38 is Gly, Asn, Ser or Thr
  Variant (39)..(44): Xaa in position 39 to 44 is any amino acid
  Variant (45)..(45): Xaa in position 45 is Phe, Ile or Leu
RXXXXXXXXXXXXXRXXXXXXXPYPPGXXXXXXGEXXXXXXXXXX

SEQ ID NO: 157447 - protein, 41 aa, Artificial sequence
  protein pattern
  Variant (2)..(6): Xaa in position 2 to 6 is any amino acid
  Variant (7)..(7): Xaa in position 7 is any or no amino acid
  Variant (9)..(9): Xaa in position 9 is Ala, Gly or Thr
  Variant (10)..(10): Xaa in position 10 is any amino acid
  Variant (12)..(12): Xaa in position 12 is Ile, Leu or Val
  Variant (13)..(13): Xaa in position 13 is Phe or Tyr
  Variant (15)..(15): Xaa in position 15 is any amino acid
  Variant (16)..(16): Xaa in position 16 is Ala, Pro or Thr
  Variant (17)..(17): Xaa in position 17 is any amino acid
  Variant (20)..(21): Xaa in position 20 to 21 is any amino acid
  Variant (23)..(23): Xaa in position 23 is any amino acid
  Variant (26)..(26): Xaa in position 26 is Gly or Pro
  Variant (27)..(27): Xaa in position 27 is Ile, Met or Val
  Variant (28)..(31): Xaa in position 28 to 31 is any amino acid
  Variant (33)..(36): Xaa in position 33 to 36 is any amino acid
  Variant (37)..(37): Xaa in position 37 is Ile or Leu
  Variant (38)..(40): Xaa in position 38 to 40 is any amino acid
  Variant (41)..(41): Xaa in position 41 is Ile, Leu or Val
HXXXXXXGXXPXXLXXXRNXXGXIGXXXXXXFXXXXXXXXX

SEQ ID NO: 157448 - protein, 32 aa, Artificial sequence
  protein pattern
  Variant (3)..(3): Xaa in position 3 is any amino acid
  Variant (5)..(5): Xaa in position 5 is any or no amino acid
  Variant (7)..(14): Xaa in position 7 to 14 is any amino acid
  Variant (15)..(15): Xaa in position 15 is any or no amino acid
  Variant (18)..(18): Xaa in position 18 is any amino acid
  Variant (20)..(21): Xaa in position 20 to 21 is any amino acid
  Variant (22)..(22): Xaa in position 22 is Ile, Leu or Val
  Variant (23)..(24): Xaa in position 23 to 24 is any amino acid
  Variant (25)..(25): Xaa in position 25 is Ala or Pro
  Variant (27)..(30): Xaa in position 27 to 30 is any amino acid
  Variant (31)..(31): Xaa in position 31 is any or no amino acid
WHXFXGXXXXXXXXXDPXKXXXXXXGXXXXXG

SEQ ID NO: 157449 - protein, 18 aa, Artificial sequence
  protein pattern
  Variant (3)..(6): Xaa in position 3 to 6 is any amino acid
  Variant (7)..(7): Xaa in position 7 is Ile or Leu
  Variant (8)..(8): Xaa in position 8 is any amino acid
  Variant (9)..(9): Xaa in position 9 is Asp, Glu, Gln or Arg
  Variant (11)..(11): Xaa in position 11 is Cys or Ser
  Variant (12)..(12): Xaa in position 12 is Ala, Asp, Glu, Gly, Gln or Thr
  Variant (13)..(13): Xaa in position 13 is Ala, Asp, Glu or Gln
  Variant (14)..(14): Xaa in position 14 is Ile, Leu, Met or Val
  Variant (16)..(17): Xaa in position 16 to 17 is any amino acid
  Variant (18)..(18): Xaa in position 18 is Phe or Tyr
RYXXXXXXXLXXXXHXXX

SEQ ID NO: 157450 - DNA, 759 bp, ESCHERICHIA COLI
  CDS (1)..(759): transl_table=11
atgaataagtttgaagatattcgcggcgtcgcttttgatcttgatggtacgctggtcgacagtgctcctggtcttgctgctgcggtagatatggcgctgtatgcgctggagttgcccgtcgcaggtgaagaacgcgttattacctggattggtaacggcgcagatgttctgatggagcgcgcattgacctgggcgcgtcaggaacgtgcgactcagcgtaaaacaatgggtaaaccgcccgttgatgacgacattccggcagaagaacaggtacgtattctgcgtaaactgttcgatcgctactatggcgaggttgccgaagaggggacgtttttgttcccgcacgttgccgatacgttgggcgcgttgcaggctaaaggcctgccgctaggcctggtcaccaacaaaccgacgccgttcgtcgcgccgctgctcgaagccttagatatcgccaaatacttcagcgtggtgattggtggtgatgatgtgcaaaacaaaaaaccgcatccggacccgctgttactggtggctgagcggatgggaattgccccacaacagatgctgtttgtcggcgactcacgcaatgatattcaggcggcaaaagcggcaggttgcccatcagttggcttaacctacggatataactacggcgaggctatcgatctcagccagcctgatgtaatttatcagtctataaatgaccttctgcccgcattagggcttccgcatagcgaaaatcaggaatcgaaaaatgactaa

SEQ ID NO: 157451 - protein, 252 aa, ESCHERICHIA COLI
MNKFEDIRGVAFDLDGTLVDSAPGLAAAVDMALYALELPVAGEERVITWIGNGADVLMERALTWARQERATQRKTMGKPPVDDDIPAEEQVRILRKLFDRYYGEVAEEGTFLFPHVADTLGALQAKGLPLGLVTNKPTPFVAPLLEALDIAKYFSVVIGGDDVQNKKPHPDPLLLVAERMGIAPQQMLFVGDSRNDIQAAKAAGCPSVGLTYGYNYGEAIDLSQPDVIYQSINDLLPALGLPHSENQESKND

SEQ ID NO: 157452 - DNA, 705 bp, Glycine max; identical to SEQ ID NO: 14771
  CDS (1)..(705)

SEQ ID NO: 157453 - protein, 234 aa, Glycine max; identical to SEQ ID NO: 14772

SEQ ID NO: 157454 - DNA, 681 bp, Vibrio cholerae O1 biovar El Tor str. N16961
  CDS (1)..(681): transl_table=11
ttgaaatccataaaattaattgcttttgatttggatggtacgctgctcgacagtgtgccggatttagcggtagcggcggatcaagcggcgcgtgcggtcggctatccggcggtgagcgaagcgcaggtgcgtgattatgtcggcaacggtgcagatgtgttgattgcgcgcgcactcagccagagcttaacgatcaatcctgaattaagcccagagctacgtgctcaagcgcgtcatctgtttgatgagttttatgaacaaacggggcacaagctgagccacctgtatcctaatgttaaaaccacgcttttagagctgcatcaagcgggctttattctggcgctcgtgaccaataagccttctaaatttgtgccagatgttctagagcaacacggcatcgcgcactttttcagtgatgtgattggcggcgataccttcccgaataaaaagccggatccgatggcgctgaattggttattagagaagcatcagttaagcgctgagcaaatgttgatggtcggggattcgaaaaacgacattctggcggcaaaaaatgctgggtgttattccttcggtttaacctacggttataaccacggcgaaccgattgccaatgcggagccagacttcgtctccgatgatattggcacgctgcttgaagtggtgctcgtttcggcgtaa

SEQ ID NO: 157455 - protein, 226 aa, Vibrio cholerae O1 biovar El Tor str. N16961
MKSIKLIAFDLDGTLLDSVPDLAVAADQAARAVGYPAVSEAQVRDYVGNGADVLIARALSQSLTINPELSPELRAQARHLFDEFYEQTGHKLSHLYPNVKTTLLELHQAGFILALVTNKPSKFVPDVLEQHGIAHFFSDVIGGDTFPNKKPDPMALNWLLEKHQLSAEQMLMVGDSKNDILAAKNAGCYSFGLTYGYNHGEPIANAEPDFVSDDIGTLLEVVLVSA

SEQ ID NO: 157456 - DNA, 675 bp, Pasteurella multocida subsp. multocida str. Pm70
  CDS (1)..(675): transl_table=11
atgacacagtttaaactcattggttttgatctcgatggcaccttagtcaacagcttgcctgacttggcgctatcggtaaattctgcttttgcggagtttgatttaccccaagcaccagaagacttggtgctgacttggattggtaacggtgcggatattttaattgcgcgtgctctggcatgggcgaaagctcaaacggggaaaaccctgaatgatgaacaaattaaagcgcttaagcgacgttttgggttttattatggtgaaaacctgtgcaacttgagtgtactgtatccaaatgtcaaatccactttagaaacgttgaaacaaaaaggctatcttttagcagtggtgacgaataagccaaccaaacatgtgcaaccggttttgcaagcctttggtattgatcacttattcagcgaacttttaggtggacaatctctgcccgcgattaaacctcaccccgcaccgctgtattatttatgtggtaaatttggtttatacccaaaacaggtgctctttgtgggggattccaaaaatgatattttagccgcgcatactgcgggttgtgctgtggttggcttaacctacggctataactacaatattcccatagcagaatccaaaccagattgggtgtttgatgattttgcacagattttgacgattttagaataa

SEQ ID NO: 157457 - protein, 224 aa, Pasteurella multocida subsp. multocida str. Pm70
MTQFKLIGFDLDGTLVNSLPDLALSVNSAFAEFDLPQAPEDLVLTWIGNGADILIARALAWAKAQTGKTLNDEQIKALKRRFGFYYGENLCNLSVLYPNVKSTLETLKQKGYLLAVVTNKPTKHVQPVLQAFGIDHLFSELLGGQSLPAIKPHPAPLYYLCGKFGLYPKQVLFVGDSKNDILAAHTAGCAVVGLTYGYNYNIPIAESKPDWVFDDFAQILTILE

SEQ ID NO: 157458 - DNA, 759 bp, Escherichia coli O157:H7 EDL933
  CDS (1)..(759): transl_table=11
atgagtaagtttgaagatattcgcggcgtcgcttttgatctcgacggtacgctggtggacagtgctcccggtcttgctgctgcggtagatatggcgctgtatgcgctggagttgcccgtcgcaggtgaagaacgcgttattacctggattggtaacggcgcagatgttctgatggagcgcgcattgacctgggcgcgtcaggaacgtgcgactctgcgtaaaacaatgggtaaaccgcccgttgatgacgacattccggcagaagaacaggtacgtattctgcgtaaactgttcgatcgttactatggcgaggttgccgaagaggggacgtttttgttcccgcacgttgccgatacgttgggcgcgttgcaggctaaaggcctgccgctaggcctggtcaccaacaaaccgacgccgttcgtcgcgccgctgctcgaagccttagatatcgccaaatacttcagcgtggtgattggtggtgatgatgtgcaaaacaaaaaaccgcatccggacccgctgttactggtggctgagcggatgggaattgctccacaacagatgctgtttgttggcgactcacgcaatgatattcaggcagcaaaagcggcaggttgcccatcagttggcttaacctacggatataactacggcgaggctatcgatctcagccagcctgatgtaatttatcagtctataaatgaccttctgcccgcattagggcttccgcatagcgaaaatcaggaatcgaaaaatgactaa

SEQ ID NO: 157459 - protein, 252 aa, Escherichia coli O157:H7 EDL933
MSKFEDIRGVAFDLDGTLVDSAPGLAAAVDMALYALELPVAGEERVITWIGNGADVLMERALTWARQERATLRKTMGKPPVDDDIPAEEQVRILRKLFDRYYGEVAEEGTFLFPHVADTLGALQAKGLPLGLVTNKPTPFVAPLLEALDIAKYFSVVIGGDDVQNKKPHPDPLLLVAERMGIAPQQMLFVGDSRNDIQAAKAAGCPSVGLTYGYNYGEAIDLSQPDVIYQSINDLLPALGLPHSENQESKND

SEQ ID NO: 157460 - DNA, 699 bp, Yersinia pestis CO92
  CDS (1)..(699): transl_table=11
atggttaagtttaaggcgattcgtggtgttgcattcgatctggatggcacattagtcgacagcgcgcccggtctggcccgtgcaattgatatggcgttggcgcatcaggggttgcctgccgctggtgaagcgttagtctccacttggattggtaatggcgcagatgtcttagtcgagcgcgcgttgcattgggcagggcgtgaacataatgctcagcttgtggcacagacccgcgagctgtttgatcactattatgccaaaaccgttgagcaggggagccagttattcccgcaagtgaaagccactttagctcaattggctgccaatggtttgccaataggcctcattaccaataagccaacaccgtttgttgcccctttactaacgtcattggggatctcagactatttctcagtcatcattgggggcgatgatgtggtggtgaagaaaccgcatccggccccgttgtatttattgctgggaaaacttggcttacatgcccgtgaaatgctgtttgtcggtgactcgcgtaatgacattatggccgcacaggcggcgggttgcccttgtattgggctgacctatggatataactacggtgaagcgattgccaccagtcatccagactgcgtgctggcgcattttgccgacctgttgcccgccattgggctaccatctttaaaagatcaggaagtataa

SEQ ID NO: 157461 - protein, 232 aa, Yersinia pestis CO92
MVKFKAIRGVAFDLDGTLVDSAPGLARAIDMALAHQGLPAAGEALVSTWIGNGADVLVERALHWAGREHNAQLVAQTRELFDHYYAKTVEQGSQLFPQVKATLAQLAANGLPIGLITNKPTPFVAPLLTSLGISDYFSVIIGGDDVVVKKPHPAPLYLLLGKLGLHAREMLFVGDSRNDIMAAQAAGCPCIGLTYGYNYGEAIATSHPDCVLAHFADLLPAIGLPSLKDQEV

SEQ ID NO: 157462 - DNA, 714 bp, Caulobacter crescentus CB15
  CDS (1)..(714): transl_table=11
atgagcacgcttcatgacctgaacggggcgaccatcgccttcgacctggacggcaccctcgtcgacaccgcgcccgacctggtgggcgcgctgaacatcatcctcgcccaagaatcgctgccgccgctgcccttcgacgatgtgcgcctgatggtgggccgaggcgcgcgggccctcttggagcgtggcttcgccgccgccggcgcgccgctcgacgccgagcaggcgcccgccctggtccagcggttcatcgacgtctacctcgcccgcatcgccgacgagagcgcgcccttccccggcgtggtcgaggtgctgagcgacctcaagacggccggcgccaagcttgtggtctgcaccaacaagctcaccaacctgtcgaccgcgctgctcgacgccgtggcgctttcgcccttcttcgaagcggtgatcggcgctgatctggcgcccgccgccaagccggacggtcgccacgtcgccgccgctgtcgcggctgtgggcggagacgttagccgcgccgtgatgatcggtgacagcgtcaatgacgcgctcggcgcccgcaacgcgggggttcccggcgtgctggtctcgttcggctacaccgaggaaccggtcgagaccctgggcgcggatctggtcatccacagctttttggacgtgcccaaggcctgcatcacgcttttgacctcttgccccgcgccgaacaccgggctatag

SEQ ID NO: 157463 - protein, 237 aa, Caulobacter crescentus CB15
MSTLHDLNGATIAFDLDGTLVDTAPDLVGALNIILAQESLPPLPFDDVRLMVGRGARALLERGFAAAGAPLDAEQAPALVQRFIDVYLARIADESAPFPGVVEVLSDLKTAGAKLVVCTNKLTNLSTALLDAVALSPFFEAVIGADLAPAAKPDGRHVAAAVAAVGGDVSRAVMIGDSVNDALGARNAGVPGVLVSFGYTEEPVETLGADLVIHSFLDVPKACITLLTSCPAPNTGL

SEQ ID NO: 157464 - DNA, 675 bp, Haemophilus influenzae Rd KW20
  CDS (1)..(675): transl_table=11
atgaacacacaatttaaacttattggctttgatttagatggcaccttggtaaatagcctgcctgatttagcgttatccgtaaattctgccttggctgaatttaatttaccgcaagcgccagaagaattagttttaacttggatcggcaatggtgcacctgtattaattgctcgagcgttagattgggcgaaaaaacaaacaggaaaagtgctaactgaaacagaggttaagcaagtaacagaacgttttaatttttattatggcgagaatttatgtaatgtcagccgcttgtatccaaatgtaaaagaaactttagaaatcctgaaagaaaaaggctatgtcctagcagttgttaccaataaacccacaagacatgttcagccagtattggccgcatttggcattgaccatttatttagtgaaatgttgggcggtcaatccttacctgccattaagccacatccagctccactttattatttatgcggaaaatttggttttgaaccacgccaagtgcttttcgtgggcgattctaaaaatgatattatcgcaggtcacgctgcgggctgtgcagttgttggtttaacttacggctacaattacaatatccctatccgtgaatccaatccagattgggtgtttgatgattttgcccagctattaagtattctttaa

SEQ ID NO: 157465 - protein, 224 aa, Haemophilus influenzae Rd KW20
MNTQFKLIGFDLDGTLVNSLPDLALSVNSALAEFNLPQAPEELVLTWIGNGAPVLIARALDWAKKQTGKVLTETEVKQVTERFNFYYGENLCNVSRLYPNVKETLEILKEKGYVLAVVTNKPTRHVQPVLAAFGIDHLFSEMLGGQSLPAIKPHPAPLYYLCGKFGFEPRQVLFVGDSKNDIIAGHAAGCAVVGLTYGYNYNIPIRESNPDWVFDDFAQLLSIL

SEQ ID NO: 157466 - DNA, 759 bp, Salmonella enterica subsp. enterica serovar Typhi str. CT18
  CDS (1)..(759): transl_table=11
atgaataagttgcagaacattcggggcgtcgcctttgatcttgacggtacgctggtggatagcgcgccgggtcttgccgcggcggtggatatggcgctgtatgcgctggaactgccggtcgcgggcgaggagcgcgtgattacctggattggtaacggcgcagacgtattgatggaacgcgcgctgacctgggctagccaagagcgcgccacgctgcgtaagactatggggaaaccgcccgttgatgaagatattcctgccgaggaacaggtacgcattctgcgtaaactgttcgacaagtattatggcgaagtggcggaagagggcacctttttatttccgcatgtcgccgacacgctgggcgcgctgcacgccagcggattgtcattaggtctggtgacgaataagccgacgccgttcgtcgcgccgttgctggaatcgcttgatatcgccaaatactttagcgtggttatcggcggcgatgatgtgcaaaataagaagccgcatccagagccgttgttgctggtggcaagccgactgggcatgacgccggagcagatgctttttgtcggcgattcgcgtaatgatattcaggccgcaaaagcggcgggctgcccttcggttggcctgacatacggctacaattatggcgaagtgatcgcccttagcgagccggacgtcatttatgacagttttaacgatcttttgcccgcacttgggcttccgcatagcgataaccaggaaataaaaaatgactaa

SEQ ID NO: 157467 - protein, 252 aa, Salmonella enterica subsp. enterica serovar Typhi str. CT18
MNKLQNIRGVAFDLDGTLVDSAPGLAAAVDMALYALELPVAGEERVITWIGNGADVLMERALTWASQERATLRKTMGKPPVDEDIPAEEQVRILRKLFDKYYGEVAEEGTFLFPHVADTLGALHASGLSLGLVTNKPTPFVAPLLESLDIAKYFSVVIGGDDVQNKKPHPEPLLLVASRLGMTPEQMLFVGDSRNDIQAAKAAGCPSVGLTYGYNYGEVIALSEPDVIYDSFNDLLPALGLPHSDNQEIKND

SEQ ID NO: 157468 - DNA, 759 bp, Salmonella enterica subsp. enterica serovar Typhimurium str. LT2
  CDS (1)..(759): transl_table=11
atggataagttgcagaatattcggggcgtcgcctttgatcttgacggcacgctggtggatagcgcgccgggtcttgccgcggcggtggatatggcgctgtatgcgctggaactgccggtcgcgggcgaggagcgcgtgattacctggattggtaacggcgcagacgtattgatggaacgcgcgctgacctgggctcgcgaggagcgcgccacgctgcgtaagacgatgggtaaaccgcccgttgatgaagatattcctgccgaggaacaggtacgtattctgcgtaagctgttcgacaggtattatggcgaagtggcggaagagggcaccgttttatttccccatgtcgccgacacgctgggcgcgctgcacgccagcggattgtcattaggtctggtgacgaataagccgacgccgttcgtcgcgccgttgctggaatcgcttgatatcgccaaatactttagtgtggttatcggcggcgatgatgtgcaaaataagaagccgcatccggagccgctgttgctggtggcaagccggctgggcatgatgccggagcagatgctttttgtcggcgattcgcgtaatgatattcaggctgcaaaagcggcgggctgcccttcggttggcctgacatacggctacaattatggcgaagcgatcgctcttagcgagccggacgtcatttatgacagttttaacgatcttttgcccgcacttgggcttccgcatagcgataaccaggaaataaaaaatgactaa

SEQ ID NO: 157469 - protein, 252 aa, Salmonella enterica subsp. enterica serovar Typhimurium str. LT2
MDKLQNIRGVAFDLDGTLVDSAPGLAAAVDMALYALELPVAGEERVITWIGNGADVLMERALTWAREERATLRKTMGKPPVDEDIPAEEQVRILRKLFDRYYGEVAEEGTVLFPHVADTLGALHASGLSLGLVTNKPTPFVAPLLESLDIAKYFSVVIGGDDVQNKKPHPEPLLLVASRLGMMPEQMLFVGDSRNDIQAAKAAGCPSVGLTYGYNYGEAIALSEPDVIYDSFNDLLPALGLPHSDNQEIKND

SEQ ID NO: 157470 - DNA, 651 bp, Xanthomonas campestris pv. campestris str. ATCC 33913
  CDS (1)..(651): transl_table=11
atgtttccgtatccgctggtgatcttcgacctggatggcacgctggtggacagcgcatcggatattgccgaggccctcaacggcaccttgcaggaactcggcctgcagcagtttcccgaagccaccgtgcgcagctggatcggcgagggcgtacacacactgttggccaccgctttgcgcgaagcaggcagcgaccgcgatgtggatgcggaaatgccggtgatgatgcgccactacgaagccagcctgctgcatcatccgcacttgtatccaggcgttgccgaggccttgcctgcgttgcgcagcgcaggcgccacgctggcgttatgcaccaacaagccggcgcgtttcatccagcccttgctcgaacacctgggcattgcggcgcagtttgcgacggtgctcggcggcgattcgttgccgcaacgcaagcctagtgcagcgcccttgctgcatctggcgcagcagttccaacatgcgcccgcgcagtgcctgatggtgggcgactcggccaccgatgccgccgctgcgcaggccgccggcatgccgttggcgatggtgcggtatggctacctgcgtggcttcgatgtggagcacgccggcgcggttgcggtgatcgacgacatgcgcgcgctgctcatgctgcactga

SEQ ID NO: 157471 - protein, 216 aa, Xanthomonas campestris pv. campestris str. ATCC 33913
MFPYPLVIFDLDGTLVDSASDIAEALNGTLQELGLQQFPEATVRSWIGEGVHTLLATALREAGSDRDVDAEMPVMMRHYEASLLHHPHLYPGVAEALPALRSAGATLALCTNKPARFIQPLLEHLGIAAQFATVLGGDSLPQRKPSAAPLLHLAQQFQHAPAQCLMVGDSATDAAAAQAAGMPLAMVRYGYLRGFDVEHAGAVAVIDDMRALLMLH

SEQ ID NO: 157472 - DNA, 759 bp, Shigella flexneri 2a str. 301
  CDS (1)..(759): transl_table=11
atgaataagtttgaagatattcgcggcgtcgcttttgatcttgatggtacgctggtcgacagtgctcctggtcttgctgctgcggtagatatggcgctgtatgcgctggagttgcccgtcgcaggtgaagaacgcgttattacctggattggtaacggcgcagatgttctgatggagcgcgcattgacctgggcgcgtcaggaacgtgcgactctgcgtaaaacaatggggaaaccgcccgttgatgacgacattccggcagaagaacaggtacgtattctgcgtaaactgttcgatcgctactatggcgaggttgccgaagaggggacgtttttgttcccgcacgttgccgatacgttgggcgcgttgcaggctaaaggcctgccgctaggcttggtcaccaacaaaccgacgccgttcgtcgcgccgctgctcgaagccttagatattgccaaatactttagcgtggttatcggcggcgatgatgtgcaaaacaaaaaaccgcatccggacccgctgttactggtggctgagcggatgggaattgccccacaacagatgctgtttgtcggcgactcacggaatgatattcaggcggcaaaagcggcaggttgcccatcagttggcttaacctacggatacaactacggcgaggctatcgatctcagccagcctgatgtaatttatcagtctataaatgaccttctgcccgcattagggcttccgcatagcgaaaatcaggaatcgaaaaatgactaa

SEQ ID NO: 157473 - protein, 252 aa, Shigella flexneri 2a str. 301
MNKFEDIRGVAFDLDGTLVDSAPGLAAAVDMALYALELPVAGEERVITWIGNGADVLMERALTWARQERATLRKTMGKPPVDDDIPAEEQVRILRKLFDRYYGEVAEEGTFLFPHVADTLGALQAKGLPLGLVTNKPTPFVAPLLEALDIAKYFSVVIGGDDVQNKKPHPDPLLLVAERMGIAPQQMLFVGDSRNDIQAAKAAGCPSVGLTYGYNYGEAIDLSQPDVIYQSINDLLPALGLPHSENQESKND

SEQ ID NO: 157474 - DNA, 819 bp, Pseudomonas putida KT2440
  CDS (1)..(819): transl_table=11
atgagtggcttcgagcagctgttcccggggacgctgccaaggctggtgatgttcgatctggacggtaccctgatcgattccgtgcctgacctggccgccgccgtggaccgcatgctgctcgaactggggcgcccgcctgctggccttgaggccgtgcgccactgggttggcaatggcgcccaggtgctggtgcgccgcgcgttggcggggggcatcgaccatgccgacgtggacgatgcgctggcagaacaggcgctggcgctgttcatggacgcttatgccgaaagccacgaacttaccgtggtctaccccggtgtgcgcgacaccctgcgctggctgcgcaagcagggcgtggagatggcgctgatcaccaacaagcctgagcgctttgttggcccgctgctggaccagatgaagatcggtaatttcttccgctggatcattggtggcgacaccttgccgcagaaaaagcccgacccggcggcgttgctgttcgtcatgcagatggccggtgtcaccccgcagcagtccctgtttgtcggtgattcgcgcagtgacgtgcaggcggccaaggcggctggcgtgcaatgcgtgggcctgacctacggctataaccatggccggccgatcgacgccgaatcccccagcctggtaatcgacgacctgcgcgcattgctgcccggttgcgcagacccggccactgggataacgttggcggaccttcaagcctcacaagacagagagtccaccgtggcggttactggcaaattctggatgaaagtcatcaaggccttggcccgttggcgttggcgcgcctga

SEQ ID NO: 157475 - protein, 272 aa, Pseudomonas putida KT2440
MSGFEQLFPGTLPRLVMFDLDGTLIDSVPDLAAAVDRMLLELGRPPAGLEAVRHWVGNGAQVLVRRALAGGIDHADVDDALAEQALALFMDAYAESHELTVVYPGVRDTLRWLRKQGVEMALITNKPERFVGPLLDQMKIGNFFRWIIGGDTLPQKKPDPAALLFVMQMAGVTPQQSLFVGDSRSDVQAAKAAGVQCVGLTYGYNHGRPIDAESPSLVIDDLRALLPGCADPATGITLADLQASQDRESTVAVTGKFWMKVIKALARWRWRA

SEQ ID NO: 157476 - DNA, 759 bp, Escherichia coli CFT073
  CDS (1)..(759): transl_table=11
atgaataagtttgaagatattcgcggcgtcgcttttgatctcgacggtacgctggttgacagtgcccccggtcttgctgctgcggtagatatggcgctgtatgcgctggagttgcctgtcgcaggtgaagaacgcgttattacctggattggtaacggcgcagatattctgatggagcgcgcattgacctgggcgcgtcaggaacgtgcgactctgcgtaaaacaatgggtaaaccgcccgttgatgacgacattccggcagaagaacaggtacgtattctgcgtaaactgttcgatcgctactatggtgaggttgccgaagaggggacgtttttgttcccgcacgttgccgatacgttgggcgcgttgcaggctaaaggcctgccgctaggcctggtcaccaacaaaccgacgccgttcgtcgcgccgctgctcgaagccttagatatcgccaaatacttcagcgtggttatcggcggcgatgatgtgcaaaacaaaaaaccgcatccggacccgctgttactggtggctgaacggatgggcattgctccacaacagatgctgtttgtcggcgactcacgcaatgatattcaggcagcaaaagcggcaggttgcccatcagttggcttaacctacggatataactacggcgaggctatcgatctcagccagcctgatgtaatttatcagtctctaaatgaccttctgcccgcattagggcttccgcatagcgaaaatcaggaatcgaaaaatgactaa

SEQ ID NO: 157477 - protein, 252 aa, Escherichia coli CFT073
MNKFEDIRGVAFDLDGTLVDSAPGLAAAVDMALYALELPVAGEERVITWIGNGADILMERALTWARQERATLRKTMGKPPVDDDIPAEEQVRILRKLFDRYYGEVAEEGTFLFPHVADTLGALQAKGLPLGLVTNKPTPFVAPLLEALDIAKYFSVVIGGDDVQNKKPHPDPLLLVAERMGIAPQQMLFVGDSRNDIQAAKAAGCPSVGLTYGYNYGEAIDLSQPDVIYQSLNDLLPALGLPHSENQESKND

SEQ ID NO: 157478 - DNA, 702 bp, Vibrio vulnificus CMCP6
  CDS (1)..(702): transl_table=11
atgagccaagtagtgatgactcaacaagagataaaattaatcgccttcgaccttgatggcaccttgctagacagcgtgccagatttggccgttgcggcggatcaagcgacacgtgcagtcggttttccgggagtaaccgagttgcaagttcgtgattacgtcggtaatggcgcagacattctgattggtcgtgccttgagccaaagcttaaccatcaacccagagttgagtgatgaattgagagctcaggcgcgtgagctgtttgatgatttctatcagcaaactggtcataagcttagccacctctacccaacggtgaaagaaacgctgaaagagctgcaccaagcgggcttcaccttggcgttggtgaccaacaaacccagcaagtttgttccggatgtgttgcagcagcacggcatcgctgattactttgtcgatgtgctcggtggtgattcattcccagagaagaaacccaacccaatcgcactcaattggctcatggaaaaacatcagattcagccaaccgagatgttgatggtgggcgactctaagaacgatattctggcagcaaaaaatgctggttgtgcctcgtttggtttgacctatggctacaaccatggcgaacctattgccgcctctgagccggatttcgttgccgatagcttggcgcaattgcttgatgtggtgctcgtttctgcttga

SEQ ID NO: 157479 - protein, 233 aa, Vibrio vulnificus CMCP6
MSQVVMTQQEIKLIAFDLDGTLLDSVPDLAVAADQATRAVGFPGVTELQVRDYVGNGADILIGRALSQSLTINPELSDELRAQARELFDDFYQQTGHKLSHLYPTVKETLKELHQAGFTLALVTNKPSKFVPDVLQQHGIADYFVDVLGGDSFPEKKPNPIALNWLMEKHQIQPTEMLMVGDSKNDILAAKNAGCASFGLTYGYNHGEPIAASEPDFVADSLAQLLDVVLVSA

SEQ ID NO: 157480 - DNA, 687 bp, Vibrio parahaemolyticus RIMD 2210633
  CDS (1)..(687): transl_table=11
atgactcaacaagatattaaactgattgcgttcgatctggatggcacattgttggacagcgtacctgatttggccgttgctgcagaccaagcggtacaagctttgggttaccctgcggtatcggaagagcaagtacgtgattacgtaggtaacggtgctgacgtcctgattggccgcgcactaagccaaagcatgaccatcagtagcgatcttagtgaagacctgcgtgcaaaaggacgcgagctgtttgatgacttttacgcgcaaagcggtcatcagctgagccatctttacccaacagtaaaagagacgctagaagagctacatcaggcaggctttacgatggcgcttgtaacgaacaaaccatcgaagtttgtgccagaaattctagagcaacatggcatcgcaaaatactttgtggacgtattgggtggtgatgcattccctgagaaaaaaccaaacccagtcgcactgaactggttgatggaaaaacatcaggtgaaagcgagcgaaatgctgatggttggcgactcgaagaatgacatccttgcggcgaaaaacgcaggttgtgcttcgtttggtttaacatacggttacaaccatggtgagcctatttcagcttcaaacccagattttgtcgcagacagtttatctgaattattggaagtagtagccgtttctgcataa

SEQ ID NO: 157481 - protein, 228 aa, Vibrio parahaemolyticus RIMD 2210633
MTQQDIKLIAFDLDGTLLDSVPDLAVAADQAVQALGYPAVSEEQVRDYVGNGADVLIGRALSQSMTISSDLSEDLRAKGRELFDDFYAQSGHQLSHLYPTVKETLEELHQAGFTMALVTNKPSKFVPEILEQHGIAKYFVDVLGGDAFPEKKPNPVALNWLMEKHQVKASEMLMVGDSKNDILAAKNAGCASFGLTYGYNHGEPISASNPDFVADSLSELLEVVAVSA

SEQ ID NO: 157482 - DNA, 759 bp, Salmonella enterica subsp. enterica serovar Typhi str. Ty2
  CDS (1)..(759): transl_table=11
atgaataagttgcagaatattcggggcgtcgcctttgatcttgacggtacgctggtggatagcgcgccgggtcttgccgcggcggtggatatggcgctgtatgcgctggaactgccggtcgcgggcgaggagcgcgtgattacctggattggtaacggcgcagacgtattgatggaacgcgcgctgacctgggctagccaagagcgcgccacgctgcgtaagactatggggaaaccgcccgttgatgaagatattcctgccgaggaacaggtacgcattctgcgtaaactgttcgacaggtattatggcgaagtggcggaagagggcacctttttatttccgcatgtcgccgacacgctgggcgcgctgcacgccagcggattgtcattaggtctggtgacgaataagccgacgccgttcgtcgcgccgttgctggaatcgcttgatatcgccaaatactttagcgtggttatcggcggcgatgatgtgcaaaataagaagccgcatccagagccgttgttgctggtggcaagccgactgggcatgacgccggagcagatgctttttgtcggcgattcgcgtaatgatattcaggccgcaaaagcggcgggctgcccttcggttggcctgacatacggctacaattatggcgaagtgatcgcccttagcgagccggacgtcatttatgacagttttaacgatcttttgcccgcacttgggcttccgcatagcgataaccaggaaataaaaaatgactaa

SEQ ID NO: 157483 - protein, 252 aa, Salmonella enterica subsp. enterica serovar Typhi str. Ty2
MNKLQNIRGVAFDLDGTLVDSAPGLAAAVDMALYALELPVAGEERVITWIGNGADVLMERALTWASQERATLRKTMGKPPVDEDIPAEEQVRILRKLFDRYYGEVAEEGTFLFPHVADTLGALHASGLSLGLVTNKPTPFVAPLLESLDIAKYFSVVIGGDDVQNKKPHPEPLLLVASRLGMTPEQMLFVGDSRNDIQAAKAAGCPSVGLTYGYNYGEVIALSEPDVIYDSFNDLLPALGLPHSDNQEIKND

SEQ ID NO: 157484 - DNA, 705 bp, Bordetella parapertussis 12822
  CDS (1)..(705): transl_table=11
atgcagaccatcaacgccgtactgctcgacctcgacggcaccctgctcgattcggtgcccgacctggccatcgccgccaatgccatgcgccgcgacctgggcatggcccagttgcccgaagcgctggtcgcgactttcgtcggcaagggcgtggacaatctggtgcgccgcgccctggccggcagcctggacggcgcagcgcccgacgaagcgctgttcgcacgcggacgcctgtcgttcttcaagcactaccacgcggtcaatggcgcgcacgccaccgtgttcgacggggtgaaggccggcctggcggcgatgcgcgaacagggcctgccgctggcggtggtcaccaacaagccgaccgagttcaccctgccgctgctcgagcgcaccggcctggcggggtttttccgcctggtggtgtgcggcgacacctgcgcgcggcgcaagcccgaccccgaccaggtgctgcatgcctgcgaccggctcggcgtcgcgccggcccaggcggtcaccatcggcgattcggtcaacgacgccctggccggccgcagggccggcaccgcggtgctggcggtgccctacggctacaacgaaggaatggacgtgcgttccctggatgtcgatggtatagttgacacgcttgtcgatgcggcccactggatttcccagcgcaacgccaagccgcagcgcaccaccgcggcctga

SEQ ID NO: 157485 - protein, 234 aa, Bordetella parapertussis 12822
MQTINAVLLDLDGTLLDSVPDLAIAANAMRRDLGMAQLPEALVATFVGKGVDNLVRRALAGSLDGAAPDEALFARGRLSFFKHYHAVNGAHATVFDGVKAGLAAMREQGLPLAVVTNKPTEFTLPLLERTGLAGFFRLVVCGDTCARRKPDPDQVLHACDRLGVAPAQAVTIGDSVNDALAGRRAGTAVLAVPYGYNEGMDVRSLDVDGIVDTLVDAAHWISQRNAKPQRTTAA

SEQ ID NO: 157486 - DNA, 705 bp, Photorhabdus luminescens subsp. laumondii TTO1
  CDS (1)..(705): transl_table=11
atggcaagtaaggtattaaaaggtattcgtgctatcgcttttgatctggacggcacactggtagacagcgccggtggtttggctgatgcactggatcaagcgctgttagccaaaggtctccctgctgcgggaaaagaacgagttgcagcttgggtcggtaatggcgcagacattatggtcgaacgtgcgttgacatgggctagaaccaaattgactgcgcaactgcataaagaaacccgtgagctgttcgaccgtttctatgaaacaaccgtaacaacaggcagccaactgttcccggaagtcaaagttacattggctgaactggcaaaacacaacttgccaatgggtatcatcaccaataaaccaacacctttcattgctcctctgttagcttctttagacatcagtgaatatttttcattagtgttaggtggtgatgatgttaaagagaaaaagccacatccggcacctatttatttaacaatgggcacattcggactgcgtaaggaagaactgctctttgtcggtgattcccgtaatgatattttagcagcacaagcggctggttgcccttgtgttggtttaacttatggatataactacggtgaatctattgcattaagcaatccagattgcatattaacgaatttttcggatctactatccacaattggcctcccatctttaaaacttcaggaagcataa

SEQ ID NO: 157487 - protein, 234 aa, Photorhabdus luminescens subsp. laumondii TTO1
MASKVLKGIRAIAFDLDGTLVDSAGGLADALDQALLAKGLPAAGKERVAAWVGNGADIMVERALTWARTKLTAQLHKETRELFDRFYETTVTTGSQLFPEVKVTLAELAKHNLPMGIITNKPTPFIAPLLASLDISEYFSLVLGGDDVKEKKPHPAPIYLTMGTFGLRKEELLFVGDSRNDILAAQAAGCPCVGLTYGYNYGESIALSNPDCILTNFSDLLSTIGLPSLKLQEA

SEQ ID NO: 157488 - DNA, 702 bp, Vibrio vulnificus YJ016
  CDS (1)..(702): transl_table=11
atgagccaagtagtgatgactcaacaagagataaaattaatcgccttcgatcttgatggcaccttgctagatagcgtgccagatttggccgttgcggcggatcaagcgacacgtgcggtcggctttccgggagtaaccgagctgcaagttcgcgattacgtcggtaatggcgcagacattctgattggtcgtgccttgagccaaagcttaaccatcaacccagagttgagtgatgaattgagagctcaggcgcgtgagctgtttgatgatttctatcagcaaactggccataagcttagccacctttacccaacggtgaaagaaacgctgaaagcgctgcaccaagcgggcttcaccttggcgttggtgaccaacaaacccagcaagtttgttccggatgtgttgcagcagcacggcatcgccgactactttgtcgatgtgctcggtggtgattcattcccagagaagaagcccaacccaatcgcactcaattggctcatggaaaaacatcagattcagccaaccgagatgttgatggtgggcgactctaagaacgatattctggctgcaaaaaatgctggttgtgcctcgtttggtttgacctatggctacaatcatggcgaacctatttctgcctctgagccggatttcgttgccgatagcttggcgcaattgcttgatgtggtgctcgtttctgcttga

SEQ ID NO: 157489 - protein, 233 aa, Vibrio vulnificus YJ016
MSQVVMTQQEIKLIAFDLDGTLLDSVPDLAVAADQATRAVGFPGVTELQVRDYVGNGADILIGRALSQSLTINPELSDELRAQARELFDDFYQQTGHKLSHLYPTVKETLKALHQAGFTLALVTNKPSKFVPDVLQQHGIADYFVDVLGGDSFPEKKPNPIALNWLMEKHQIQPTEMLMVGDSKNDILAAKNAGCASFGLTYGYNHGEPISASEPDFVADSLAQLLDVVLVSA

SEQ ID NO: 157490 - DNA, 696 bp, Neosartorya fischeri NRRL 181
  CDS (1)..(696)
atgaccaacctcgtgatcctcgacttcgacggcacaatctttgacacccgcgaagcaatccaacacgccgcaaccctaaccttcaccaccctcctccctacccacgaaatcccctatgccaaagcccgaaggctgatggccaccggcgccgggctgccagagaccttccgcgcgctgcaccccgatccatcaaccttcaacgaggaagaatgggtcgcgacctaccgatccctctacgcggcgcacgaggagaatttcacgaaaccgttcccgggtctccgtgagctactggcggggcttcactcgcggcgaatccccatcgcaatcgtgagtaataaggcggttccaccgattaagacggcgttggagagaatggagctcgcggagctcgttcctgaggtgctgatcatcggggatgggacgccgggagcgaagaggaagcctgacgcagcgagtttcacggaagtgctggtaccacggttgaaaggggtatacggggaggggtttgaggtagaccctagcagggtgttgatggttggggatacgattacggatctgaagtatgcgcgcaatatcggggcgaggggatgttggtgtcggtttgggcagggggataaggaggaatgcgaattgttcgggccggattacgcggtggattcgttgtcggaggttctggagattgcggtcaaggagtag

SEQ ID NO: 157491 - protein, 231 aa, Neosartorya fischeri NRRL 181
MTNLVILDFDGTIFDTREAIQHAATLTFTTLLPTHEIPYAKARRLMATGAGLPETFRALHPDPSTFNEEEWVATYRSLYAAHEENFTKPFPGLRELLAGLHSRRIPIAIVSNKAVPPIKTALERMELAELVPEVLIIGDGTPGAKRKPDAASFTEVLVPRLKGVYGEGFEVDPSRVLMVGDTITDLKYARNIGARGCWCRFGQGDKEECELFGPDYAVDSLSEVLEIAVKE

SEQ ID NO: 157492 - DNA, 693 bp, Aspergillus clavatus NRRL 1
  CDS (1)..(693)
atgaccgacctcgtcatcttcgacttcgacggcacaatgttcgacacccgcgccgccatcgaacatgcagcggccctcaccttctccacgctcctcccctcatacgagatcccccgcgataaggcccgccggttgatggccagcggcgtcggcctgtcagagacctttcgcgccctgcacccagatgagaccttcgacgaagacacatgggtggcaacctaccgccagctttacactacacacgaggggaaattcactaagccgttcccgggactgcaggaggtgctggaggggctgaaggcgcggggcatcccgattgccattgtcagtaacaaggtggtccctgcgatccggacaacgctggagcggatgaatctatcagggtatttccacgagacgctgattatcggtgatcgcacgccggggtcggagaaaaagccggatccgacgagttacacggaggtgctggtaccacggttcaagagagtacatggggacggggtagcgctggacccggcgaaggtgctcatggtgggagatacaattgcggatctggagtatgcgcggaatattggggccaaagtctgttggtgccggtttggacagggagatagagaagagtgtggatcgtttcagccggattacacggtggattcattatccgaggttctggacatcgtggcgaagcaatag

SEQ ID NO: 157493 - protein, 230 aa, Aspergillus clavatus NRRL 1
MTDLVIFDFDGTMFDTRAAIEHAAALTFSTLLPSYEIPRDKARRLMASGVGLSETFRALHPDETFDEDTWVATYRQLYTTHEGKFTKPFPGLQEVLEGLKARGIPIAIVSNKVVPAIRTTLERMNLSGYFHETLIIGDRTPGSEKKPDPTSYTEVLVPRFKRVHGDGVALDPAKVLMVGDTIADLEYARNIGAKVCWCRFGQGDREECGSFQPDYTVDSLSEVLDIVAKQ

SEQ ID NO: 157494 - DNA, 696 bp, Ajellomyces capsulatus NAm1
  CDS (1)..(696)
atgggattctccgcgccgtcgcaaaccttttcatttgacggtctcctttttgactttgatgggaccattatagattcgactcctgcgattatcaagcactggcaccgactaggtgccgaactgaacttagaccctgaagtgatattaaagacatcccatggacgaagaagtatagatgtcctacagatcattgctccggaaaaagctaactgggaatacgttagttatgttgaaggccggatccccaaggagtatggccaggatgctgtggaaatacctggagcacgacagctgctagactccttagataaagcaggagccccctgggctgtggttacctcagggaccaaggcacttgtacacggctggctggaagtgttgaaacttgcgtatcccaagtacatggttgtcgccgaagatgtagaggttggaaagccagatccacaatgttacctgatgggccgctcacgacttggcctggatgacggggctgagatgctggtggttgaggacgcaccttcaggtatccgggctggcaaggccgcaggcttcaaggtcgttgcccttgcttcgacgcataagattgacgatctcaaggaggctggggcagattggattgttcaggatctgcgaagtgttacactgcaaggctgcaatggaaaggtggaaattgagatatcgaatgctttgcagtga

SEQ ID NO: 157495 - protein, 231 aa, Ajellomyces capsulatus NAm1
MGFSAPSQTFSFDGLLFDFDGTIIDSTPAIIKHWHRLGAELNLDPEVILKTSHGRRSIDVLQIIAPEKANWEYVSYVEGRIPKEYGQDAVEIPGARQLLDSLDKAGAPWAVVTSGTKALVHGWLEVLKLAYPKYMVVAEDVEVGKPDPQCYLMGRSRLGLDDGAEMLVVEDAPSGIRAGKAAGFKVVALASTHKIDDLKEAGADWIVQDLRSVTLQGCNGKVEIEISNALQ

SEQ ID NO: 157496 - DNA, 711 bp, Laccaria bicolor S238N-H82
  CDS (1)..(711)
atgcctgacaccatcgtccatgtcgatgccattctcttcgatatggatggtaccctagttgattccactcaaggcgttgtgggtgcctggcaaactttcagggaaacataccctgacattgacgtacaccacatattgagctccgcgcatggtgttcgtactgtcgataatcttagcaagtactgcgggattgatgacccggatctgcttcagagcgaggcagagcgttttgaacgcgcaatcgtgacttcatcttcagaagcaggccggcaaggtattacccttttgcccggagtcgcgtcggtaatggaggagcttgccccggggcgttttttactcaaaccctgctgggccatctgcacatccgcaacgcgcccttacgctacctctgcgctcaagatcgcagacgttcccatacctgacgtattcattacagcagaggacgtcacacagggcaagccatttccagatccttacctgctaggcgcagagaaatgcggggtcaagcccgaaaattgcctcgttttcgaagatgcacctaatggcattcgtagcggccggaccgctggttgcaagactgttgcttttcttaccagtcacagcagggaacaagttcaggctgctgagccggattttatcgtgaaggacatgtcatgtatatccatgaaacggacttccaacggcgtggaggtgataatcaagtctcactag

SEQ ID NO: 157497 - protein, 236 aa, Laccaria bicolor S238N-H82
MPDTIVHVDAILFDMDGTLVDSTQGVVGAWQTFRETYPDIDVHHILSSAHGVRTVDNLSKYCGIDDPDLLQSEAERFERAIVTSSSEAGRQGITLLPGVASVMEELAPGRFLLKPCWAICTSATRPYATSALKIADVPIPDVFITAEDVTQGKPFPDPYLLGAEKCGVKPENCLVFEDAPNGIRSGRTAGCKTVAFLTSHSREQVQAAEPDFIVKDMSCISMKRTSNGVEVIIKSH

SEQ ID NO: 157498 - DNA, 699 bp, Aspergillus flavus NRRL3357
  CDS (1)..(699)
atgcctacaaccctcgccatcttcgacttcgacggcaccctcttcgacacccacgaatccatctcccaaaccatcaaattgaccttcgacgccctcctccccacccacgctcctccccagcccgaaatccaccgtctcatcgccagcggcgccggcctcgccgacaccttccgcgccctccacccggaccccgcaacattcacagcccaagaaaaccactggatcgacaaataccgcgccctctacgccacccacggccaactcctcatcaaagccttccccggtgcccaggagctcttgacagaactcaaggcccatcatgtgcccatcgctattgtcagtaataagggcgtggcggcggtgaagacggcgttggaaaggaacggattggctgggtatgtgcccgaggagctgattatcggggataagacgcctggggcgcagcggaagccggatccggcgagttttgtggatgtgcttgttcccgttctgggggagaggtttggaataaacgtggtcgcggacgagggtgtcttggtggttggggatacggtggcggatattcagtttgcgaggaatattggggggagggtgtgttggtgtcgatatgggtatggggatcgggaggcttgtgaggggttggggcccgattatgtggtggattctttggcggatgttgtgggtattgtgaaggggtga

SEQ ID NO: 157499 - protein, 232 aa, Aspergillus flavus NRRL3357
MPTTLAIFDFDGTLFDTHESISQTIKLTFDALLPTHAPPQPEIHRLIASGAGLADTFRALHPDPATFTAQENHWIDKYRALYATHGQLLIKAFPGAQELLTELKAHHVPIAIVSNKGVAAVKTALERNGLAGYVPEELIIGDKTPGAQRKPDPASFVDVLVPVLGERFGINVVADEGVLVVGDTVADIQFARNIGGRVCWCRYGYGDREACEGLGPDYVVDSLADVVGIVKG

SEQ ID NO: 157500 - DNA, 723 bp, Gibberella zeae PH-1
  CDS (1)..(723)
atgggatcgacaccagagtacatccagcctccacaggaactcacctttgatgggttcctgttcgacatggatggcaccattattgactccacggaagcagtggtcaagcattgggaaacaattggcaacgagataggcgttgcacccgaagttattcttgaaacttcccatggacgacgaagcattgatatcctcaagattcttgcacctaaaaaggccaattgggactatgtacgtgacatggagggacgtcttcccaagtaccacggccacgaggccgtcgagataccaggcgcccgttccatgctagaagctctcatcgccagatctagcccctgggcgatcgtcacgtcgggcactgtacctctcgtgactggatggttgcgtgctcgagacctgcctacaccgctgccggagcacctcgtcactgcagagtcggttgagaatggcaaacccgaccccgcctgctatcgccttggccgtgagcgtctcggcctacaagcggaggatgcccagattctggtccttgaagacagcccagcagggattcgtgcaggaaaggcagctgggtgcaaggtcctcggtctggtgacaagccataccgtcgagcaggtcgtcgccgcagagccagattgggttgttcgagacctctcctcagtcgaggtgcttcggagcgagggcggcaaggtgaccatcaaaatttccaatgccctgcgactatga

SEQ ID NO: 157501 - protein, 240 aa, Gibberella zeae PH-1
MGSTPEYIQPPQELTFDGFLFDMDGTIIDSTEAVVKHWETIGNEIGVAPEVILETSHGRRSIDILKILAPKKANWDYVRDMEGRLPKYHGHEAVEIPGARSMLEALIARSSPWAIVTSGTVPLVTGWLRARDLPTPLPEHLVTAESVENGKPDPACYRLGRERLGLQAEDAQILVLEDSPAGIRAGKAAGCKVLGLVTSHTVEQVVAAEPDWVVRDLSSVEVLRSEGGKVTIKISNALRL

SEQ ID NO: 157502 - DNA, 720 bp, Aspergillus nidulans FGSC A4
  CDS (1)..(720)
atggcccccaaactcatcatcttcgacttcgatggaactctctttgactccctatcggcaattaccacctccgttcaactgaccttcaacgccctcctcccctcctacaccccaacaccatccgatatccaccggttggtctccagaggcgcaccaccagaaatcactttcatggccctgcaaccccagtctccagtatccgttgatggagtggacgcctttgacgaagagacctgggttcgcacataccgccaaatatattctgtccacggccacccactaacgaagccgtatcccggcgctaaagaggtcctgctctcgctgcgggaaaaagggattccgcttgcaatcatcagtaataaggccgttgctgctgtgaaaagcgcgctggagagccatggtcttggcgggatcatcaatgaagagctgattatcggtgagccgatgtttgcgagtgggaagagaaagccgcatccggaggggttcacggaggtgttgctccctaggctgaaaagtgtgtatgggactgtggggtatgacgagggagaggtgcttatggttggggatacgatcacggatatcctctttgcgaagaatatcggcgcaaaggcttgctggtgccggtttgggcagggcaaccgggaggagtgtgagaaggagagtccggagtctgggattgatgagttgatagacgtccttggggttgtcgatgagctgtga

SEQ ID NO: 157503 - protein, 239 aa, Aspergillus nidulans FGSC A4
MAPKLIIFDFDGTLFDSLSAITTSVQLTFNALLPSYTPTPSDIHRLVSRGAPPEITFMALQPQSPVSVDGVDAFDEETWVRTYRQIYSVHGHPLTKPYPGAKEVLLSLREKGIPLAIISNKAVAAVKSALESHGLGGIINEELIIGEPMFASGKRKPHPEGFTEVLLPRLKSVYGTVGYDEGEVLMVGDTITDILFAKNIGAKACWCRFGQGNREECEKESPESGIDELIDVLGVVDEL

SEQ ID NO: 157504 - DNA, 696 bp, Aspergillus fumigatus Af293
  CDS (1)..(696)
atggccgacctcgtgatcctcgacttcgacggcacaatcttcgacacccgcgaagcaatccaacacgccgcaagactcacgttcaccaccctcctccccacccacgagatcccctatgccaaagcccgacggctgatggccaccggcgcggggctgtcagagaccttccgcgctctccaccccgatccatcaaccttcaacgaggaaaaatgggtcgcgacctaccgatccctctacgcggcgcacgaggagaaattcacgaacccgttccccggtctccgtgagctactggaggggctccactcacggcgaatccccattgcaatcgtgagtaataaggcggttccaccgattaagacggcgttggagagaatggagctagcggagttcgttccggaggcgctgatcatcggggatgggacgccgggggcgaaaaggaagcctgacgcaacgagtttcacggacgtgctggtaccgcggttgaaaggggtatacggggaggggtttgcggtagacccgagcagggtgctgatggttggggacacgattacggatctgaagtatgcgcgcaatatcggggcgaggggatgttggtgtcgatttgggcagggcgataaggaggagtgcgaatcgttccggccggattatgcggtggattcgttggcggaggttctggagattgcggtcaaggagtag

SEQ ID NO: 157505 - protein, 231 aa, Aspergillus fumigatus Af293
MADLVILDFDGTIFDTREAIQHAARLTFTTLLPTHEIPYAKARRLMATGAGLSETFRALHPDPSTFNEEKWVATYRSLYAAHEEKFTNPFPGLRELLEGLHSRRIPIAIVSNKAVPPIKTALERMELAEFVPEALIIGDGTPGAKRKPDATSFTDVLVPRLKGVYGEGFAVDPSRVLMVGDTITDLKYARNIGARGCWCRFGQGDKEECESFRPDYAVDSLAEVLEIAVKE

SEQ ID NO: 157506 - DNA, 762 bp, Neurospora crassa OR74A
  CDS (1)..(762)
atgaggggcaagatgggaagcacctttatagacacttcgggcgcggacttctccgcgcccccggttcgggtcaccttcgacggccttttgttcgacatggatggcaccatcattgactctaccgccgctgttgagaaacactgggaggccatcggtaaggagattgggcactcgcccgaggtcatcctccagacctcccatggcagaagatccattgatattctcaaagaacttgccccggagaaggcaactttggagtacgttcagcacatggagggtcttctccctaagaagtatggcgacgacgcggttgagatccccggcgcccgcgccctgcttcaagacttgatagatcgtaagaagccgtgggccatcgttacttcagtctgcgccgctcccatccagccatcatggttggacgtcctctccctcccccaccccgcgcacctcatctccgccgaatccgtcgtgaacggcaagcccgatcctgcctgctacttgctcggtcgcgaacgcctcggcctctcaaacccaaacgtcgaggtcttagtgctggaagacgcgcccgcgggtatccgcgccggcaaagccgcgggctgcaaggtcattggcttggtcaccagccatacggttgaacaggtgctggaagcgggtccagattgggtggtgagggatttaagcagtgttaagtttgtgccggagagcagcggagaggggaaggttactttggaaattagggatgcgttggtcttgaagaactag

SEQ ID NO: 157507 - protein, 253 aa, Neurospora crassa OR74A
MRGKMGSTFIDTSGADFSAPPVRVTFDGLLFDMDGTIIDSTAAVEKHWEAIGKEIGHSPEVILQTSHGRRSIDILKELAPEKATLEYVQHMEGLLPKKYGDDAVEIPGARALLQDLIDRKKPWAIVTSVCAAPIQPSWLDVLSLPHPAHLISAESVVNGKPDPACYLLGRERLGLSNPNVEVLVLEDAPAGIRAGKAAGCKVIGLVTSHTVEQVLEAGPDWVVRDLSSVKFVPESSGEGKVTLEIRDALVLKN

SEQ ID NO: 157508 - DNA, 681 bp, Halorhodospira halophila SL1
  CDS (1)..(681): transl_table=11
atggatctctcgctaacccgcgcgattctcttcgatctggacgggacgctggtggacagcgccccggatctgaccgtcgccatcaaccaggtgctcgccgagcgggaccacgccccggtgaccgaggagcaggtccgcggttgggtgggcaatggtgcccgtcggctggtggcccgcgccctcaccggcgcggacgacggcaacccgccagaagaggagctggacgccgcgctcgagcgcttcttcgagtgctacggcgaggccgtctacgtacacagccgcccctacccggaggccgtcgagaccctgcaggccctggcccaggccggcatgcgtctggccgtggtcaccaacaagccgcggcgcttcgccgagccgatcctccagggcatgggggtgacggatgccatcgacgtggtcgttggcggcgagtgcaccgaggcccgcaagcccgacccggagccgctccggctggccatggagcgcctgggggcggcgtcgcggaccgtgctgatggtcggtgactcgcgaaccgacgtggaggcggcgcgcaacgccggtattccggtggtgtgtgtgccctacggctaccgccgcggggtggcgctggaagacctgggcgccgacgccatcgtggatgatctcagcggcgtggtcgcgctgctacgcgaggcggcctga

SEQ ID NO: 157509 - protein, 226 aa, Halorhodospira halophila SL1
MDLSLTRAILFDLDGTLVDSAPDLTVAINQVLAERDHAPVTEEQVRGWVGNGARRLVARALTGADDGNPPEEELDAALERFFECYGEAVYVHSRPYPEAVETLQALAQAGMRLAVVTNKPRRFAEPILQGMGVTDAIDVVVGGECTEARKPDPEPLRLAMERLGAASRTVLMVGDSRTDVEAARNAGIPVVCVPYGYRRGVALEDLGADAIVDDLSGVVALLREAA

SEQ ID NO: 157510 - DNA, 699 bp, Yersinia enterocolitica subsp. enterocolitica 8081
  CDS (1)..(699): transl_table=11
atgactaagttcgactctatccgcggtgtggctttcgatctggatggcacattggttgatagcgctccggggcttgccagcgcgattgatatggcgctgtcacatcaaaacttgccggttgccggtaaagatttggtatcaacctggattggcaatggcgctgatgtgttagtcgagcgtgcattgcgctgggctggctgcgagccagatgcacaatctgtggcgcatacccgtgaattgtttgaccactattacgcccagacggttgagcagggaagtcagctattcccgcaagtgaaagcgacattggaacaactggcggccagtggtttgccgatgggtctgattaccaataagcccacgccatttgttgcaccgctgctgaggtctttgggtattgccaattatttctccgtcatcattggcggtgatgatgtggtggtgaagaaaccgcatccagctccattgtatttattgttggccaaacttggcttgcatgcccatgagatgctgtttgttggtgattcacgtaatgacataatggccgcgcaggcggcgggttgcccttgtgtcgggctgacctatggatataactacggtgaagctattgccaccagtcatcctgactgtgtgctggagcactttgcctgtctgttgcccgccatcgggctaccatctttaaaagatcaggaagtataa

SEQ ID NO: 157511 - protein, 232 aa, Yersinia enterocolitica subsp. enterocolitica 8081
MTKFDSIRGVAFDLDGTLVDSAPGLASAIDMALSHQNLPVAGKDLVSTWIGNGADVLVERALRWAGCEPDAQSVAHTRELFDHYYAQTVEQGSQLFPQVKATLEQLAASGLPMGLITNKPTPFVAPLLRSLGIANYFSVIIGGDDVVVKKPHPAPLYLLLAKLGLHAHEMLFVGDSRNDIMAAQAAGCPCVGLTYGYNYGEAIATSHPDCVLEHFACLLPAIGLPSLKDQEV

SEQ ID NO: 157512 - DNA, 696 bp, Shewanella loihica PV-4
  CDS (1)..(696): transl_table=11
atgaaagcccaatctattaaggcgatcgccttcgatctcgacggcacgcttatcgacagcgtgccggatctggccgccgccacccaaggcatgctcgccgagcttgccttgcccctgtgcgacgaggagcaggtgcgaagctgggtaggcaatggcgccgccaagctggtggagcgcgccttgaccttcgcccgcggtgaggcggcaacacaggcctatatcgatgcggcaatgccgctgtttagcaagcattacgaggcaaatctgcagcagcacagccgcctctatgatggtgttaagtctgtactcgagcagctggtgtcgctgggttaccaactggcgattgtcaccaataagccctatcgcttcaccgtgcctctgctggaggccttcggcatagctcacctgtttaatcaggtgttggggggcgattcgctggagaagatgaagccggatcccctgccgctgacgcacctcaaacaggcatggcagctcgaagatgagcagcttttgatggtgggtgactcccgaaacgatattttagcggcgaaagcggcgggtatttcctcgatcggcttgacctacgggtacaactacggtgaagatattgggctcagcggcccgacggccgtttgtaacacatttagcgaagtattggcgcagataacagatagccaaatagcattggagcaataa

SEQ ID NO: 157513 - protein, 231 aa, Shewanella loihica PV-4
MKAQSIKAIAFDLDGTLIDSVPDLAAATQGMLAELALPLCDEEQVRSWVGNGAAKLVERALTFARGEAATQAYIDAAMPLFSKHYEANLQQHSRLYDGVKSVLEQLVSLGYQLAIVTNKPYRFTVPLLEAFGIAHLFNQVLGGDSLEKMKPDPLPLTHLKQAWQLEDEQLLMVGDSRNDILAAKAAGISSIGLTYGYNYGEDIGLSGPTAVCNTFSEVLAQITDSQIALEQ

SEQ ID NO: 157514 - DNA, 762 bp, Enterobacter sp. 638
  CDS (1)..(762): transl_table=11
atgaataaattacaggcaatacgcggcgtcgcgtttgaccttgatggcacgctggtcgatagcgcgccgggtttaaccagcgccgtcgatcaggcgctgtatgcgctggagttgcccgttgcgggtgaagaccgggtgataacctggattggaaacggtgctgatgtgctgatggaacgtgcgttgacgtggtcccgtcaggaacgcgctattcagcgttcggcacagggtaaacctggcgttgaccatgctgatatcccgcaggatgagcaactgcgcgttctgcgtaaactgtttaaccgtttttatgaagagaccgtggaagagggcagttttctgttcccggacgttgtcgatacgctgagcgcgttgcatgcccatggcatgccgctggcgctggtcaccaacaagccgacgccgtttgtggcgccgttgctagaagccctcgacatcgcaaaatatttctcggtgattgtgggcggtgatgacgtacagaataaaaagccgcatccggaaccgatattgctggtggcagggaaattatccttaacgcctgaacaactgctttttgtcggcgattcgcgtaatgatattctggccgccaaagccgcaggttcgccgtctgtgggattaacctacggctataactacggtgaatccatcacgctgagtgaaccggacgccgtgttcgatcacttcaaagatttactgcccgcactcgggctttcgcacagtgaacatcaggaatcgaaaaatgactaa

SEQ ID NO: 157515 - protein, 253 aa, Enterobacter sp. 638
MNKLQAIRGVAFDLDGTLVDSAPGLTSAVDQALYALELPVAGEDRVITWIGNGADVLMERALTWSRQERAIQRSAQGKPGVDHADIPQDEQLRVLRKLFNRFYEETVEEGSFLFPDVVDTLSALHAHGMPLALVTNKPTPFVAPLLEALDIAKYFSVIVGGDDVQNKKPHPEPILLVAGKLSLTPEQLLFVGDSRNDILAAKAAGSPSVGLTYGYNYGESITLSEPDAVFDHFKDLLPALGLSHSEHQESKND

SEQ ID NO: 157516 - DNA, 819 bp, Pseudomonas putida F1
  CDS (1)..(819): transl_table=11
atgagtggcttcgagcagctgttcccgggggagctgccaaggctggtaatgttcgatctggacggtaccctgatcgattccgtgcctgacctggccgccgctgtggaccgcatgctgctcgaactggggcgcccgcctgctggccttgaggcagtgcgccactgggttggcaatggcgcccaggtgctggtgcgccgcgcgttggcgggcggcatcgaccatgccgacgtggacgatgcgctggcagaacaggcgctggcgctgttcatggacgcttatgccgaaagccatgaacttaccgtggtctatcctggcgtgcgcgacaccctgcgctggctgcgcaagcagggcgtggagatggcgctgattaccaacaagcctgagcgctttgttggcccgctgctggaccagatgaagatcggtaatttcttccgctggatcattggtggcgacaccctgccgcagaaaaagcccgacccggcggcgttgctgttcgtcatgcagatggccggtgtcaccccgcagcagtccctgtttgtcggtgattcgcgcagtgacgtgcaggcggccaaggcggctggcgtgcaatgcgtgggcctgacctacggctataaccatggccggccgatcgacgacgaatcccccagcctggtaatcgacgacctgcgcgcattgctgcccggttgcgcagacccggccactgggataacgttggcggaccttcaagcctcacaagacagagagtccaccgtggcggttactggcaaattctggatgaaagtcatcaaggccttggcccgttggcgttggcgcgcctga

SEQ ID NO: 157517 - protein, 272 aa, Pseudomonas putida F1
MSGFEQLFPGELPRLVMFDLDGTLIDSVPDLAAAVDRMLLELGRPPAGLEAVRHWVGNGAQVLVRRALAGGIDHADVDDALAEQALALFMDAYAESHELTVVYPGVRDTLRWLRKQGVEMALITNKPERFVGPLLDQMKIGNFFRWIIGGDTLPQKKPDPAALLFVMQMAGVTPQQSLFVGDSRSDVQAAKAAGVQCVGLTYGYNHGRPIDDESPSLVIDDLRALLPGCADPATGITLADLQASQDRESTVAVTGKFWMKVIKALARWRWRA

SEQ ID NO: 157518 - DNA, 675 bp, Haemophilus influenzae PittEE
  CDS (1)..(675): transl_table=11
atgaatacacaatttaaactgattggttttgatttagatggcaccttggtaaatagcttgcctgatttagcactatccgtaaattctgctttggctgagcttaatttaccgcaagcacctgaagaattagttttaacttggatcggtaatggcgcgcctgtattaattgcccgtgcgttagattgggcgcaaaaacaaacaggaaaagttttaactgaagaagagattaagcaagtaacagaacgttttaattttcattatggcgagaatttatgtaatgtcagtcgcctgtatccgaatgtaaaagaaacattagaaaccttaaaagaaaaaggctatatcttatcggttgttactaataaaccgacaaagcacgttcaaccagtgttggcagcgtttggcattgatcatttatttagtgaaatgttgggcggtcaatccttacctgcaattaagccacatccagctccactttattatttatgcggaaaatttggttttgaaccacgccaagtgcttttcgtaggcgattctaaaaatgatattatcgcaggtcacgctgcgggctgtgcagttgttggtttaacttacggctacaattacaatatccctatccgtgaatccaatccagattgggtgtttgatgattttgcccagctattaacgattctttaa

SEQ ID NO: 157519 - protein, 224 aa, Haemophilus influenzae PittEE
MNTQFKLIGFDLDGTLVNSLPDLALSVNSALAELNLPQAPEELVLTWIGNGAPVLIARALDWAQKQTGKVLTEEEIKQVTERFNFHYGENLCNVSRLYPNVKETLETLKEKGYILSVVTNKPTKHVQPVLAAFGIDHLFSEMLGGQSLPAIKPHPAPLYYLCGKFGFEPRQVLFVGDSKNDIIAGHAAGCAVVGLTYGYNYNIPIRESNPDWVFDDFAQLLTIL

SEQ ID NO: 157520 - DNA, 675 bp, Haemophilus influenzae PittGG
  CDS (1)..(675): transl_table=11
atgaatacacaatttaaacttattggctttgatttagacggcaccttggtaaatagcttgcctgatttagcgttatccgtaaattctgctttggctgaatttgatttaccgaaagcgccagaagaattagttttaacttggatcggtaatggcgcgcctgtattaattgctcgagcgttagattgggcgaaaaaacaaacaggaaaagttttaactgaagaagagattaagcaagtaacagaacgttttaatttttattatggcgagaatttatgtaatgtcagccgcttgtatccaaatgtaaaagaaactttagaaaccttgaaagaaaaaggctatgtcctagcagttgttacgaataaaccgacaaagcacgttcaacctgtattagctgcatttggcattgatcatttatttagtgaaatgttgggcggtcaatccttacctgccattaagccacatccagctccactttattatttatgcggaaaatttggttttgaaccacgccaagtgcttttcgtgggcgattctaaaaatgatattatcgcggctcacgctgcgggctgtgcagttgttggtttaacttacggctacaattacaatatccctatccgtgaatccaatccagattgggtgtttgatgattttgcccagctattaagtattctttaa

SEQ ID NO: 157521 - protein, 224 aa, Haemophilus influenzae PittGG
MNTQFKLIGFDLDGTLVNSLPDLALSVNSALAEFDLPKAPEELVLTWIGNGAPVLIARALDWAKKQTGKVLTEEEIKQVTERFNFYYGENLCNVSRLYPNVKETLETLKEKGYVLAVVTNKPTKHVQPVLAAFGIDHLFSEMLGGQSLPAIKPHPAPLYYLCGKFGFEPRQVLFVGDSKNDIIAAHAAGCAVVGLTYGYNYNIPIRESNPDWVFDDFAQLLSIL

SEQ ID NO: 157522 - DNA, 762 bp, Klebsiella pneumoniae subsp. pneumoniae MGH 78578
  CDS (1)..(762): transl_table=11
atggataaattacaggcgatccgcggcatcgcatttgatctcgacggcacgctggtggacagcgcgccgggtctaacctcggcggttgataacgctctgtacgccctggagctgccggtggcgggagaagaacgcgttatcacctggatcggtaacggcgccgatgtcctgatggagcgggcgctgacctgggctcgtcaggagcgagcaacgttacgtgcggcgatgggcaagccttccgtcgacgatcatgatattccgcaagacgagcagctgcgcattttgcgtaaactgtttgaccgctattacgccgaagcggcggaagagggcagtttcctgttcccggcggtggccgatacgctcggcgcgctgcatgccaaaggcctgccgctggcgctggttacaaataagccgacgccgtttgtcgccccgctgttggacgcgctcgatattgcgaaatattttaccgtggtgattggcggcgatgacgtgcagaataaaaagccgcatccggaaccgctgctgctggtggcggaaaagctctctctggctccagccgagctgctgtttgtcggcgattcgcgcaatgatattcaggcgggcaaagcggcaggctgctgctctgttggtctgacctacggttataactatggtgaaccgcttgcgctgagcgagccggactatctcttcgaccagtttaacgaactcttacccgctctcgggttaccgcacagtgaaactcaggaattgaaacatgactaa

SEQ ID NO: 157523 - protein, 253 aa, Klebsiella pneumoniae subsp. pneumoniae MGH 78578
MDKLQAIRGIAFDLDGTLVDSAPGLTSAVDNALYALELPVAGEERVITWIGNGADVLMERALTWARQERATLRAAMGKPSVDDHDIPQDEQLRILRKLFDRYYAEAAEEGSFLFPAVADTLGALHAKGLPLALVTNKPTPFVAPLLDALDIAKYFTVVIGGDDVQNKKPHPEPLLLVAEKLSLAPAELLFVGDSRNDIQAGKAAGCCSVGLTYGYNYGEPLALSEPDYLFDQFNELLPALGLPHSETQELKHD

SEQ ID NO: 157524 - DNA, 684 bp, Marinomonas sp. MWYL1
  CDS (1)..(684): transl_table=11
atgaagactcctagctatttttcaaagtggtttgatggcggttggcctgagttagtttgtttggatcttgatgggacattggttgatagtgtgcctgatatcgccgctgcggtagatgctttcttagctgagcttggggccccgcttgccggtgaagagcgtgttcgtagttgggtaggttttggttcggctaaattgatcgaacaggcacttgagtgggcagatattgattctgctaaacaggaagaagcgtatcgtatttttctgacacactatcatgcgcatttgaccgacggcacgacgctttatccaaatgtaaaagccttgttaaaagcttttaaacataacggtgttcctgttgcgttgattactaataagccgagtgtgtttgttaagcccatgctagatcattttgaactgacggagcagtttggttggttgttgggaggagacaccttagaagagaaaaaaccatcggctatgcctttgttgcattgtagtgagtctattgaggccttacctgaaaattgcctgatgattggggattccattactgactttaaggctgcaagtaatgctggcttcaaatgtgctttggtgacttatggttacaaccaaggtgttgatcttaaggagctgggtgctgatgccataatagatgatttagctgagttgcttgtctga

SEQ ID NO: 157525 - protein, 227 aa, Marinomonas sp. MWYL1
MKTPSYFSKWFDGGWPELVCLDLDGTLVDSVPDIAAAVDAFLAELGAPLAGEERVRSWVGFGSAKLIEQALEWADIDSAKQEEAYRIFLTHYHAHLTDGTTLYPNVKALLKAFKHNGVPVALITNKPSVFVKPMLDHFELTEQFGWLLGGDTLEEKKPSAMPLLHCSESIEALPENCLMIGDSITDFKAASNAGFKCALVTYGYNQGVDLKELGADAIIDDLAELLV

SEQ ID NO: 157526 - DNA, 675 bp, Actinobacillus succinogenes 130Z
  CDS (1)..(675): transl_table=11
atggcctctcaatttaaattaatcggcttcgatttggacggcacgctggtcaacagcctgcccgatcttgctttatccgtcaattcggcattagcggaattcggtttaccgcaagcaccggaacccttggtattaacctggatcggcaacggtgccgatgtgttgatcagtcgcggggtagaatgggcaagcgtgcaatccggtacaaccctcagcgaagaggaaaccgtgcaacttaaagcgcgttttaatcacttctacggtgaaaatctgtgtaacgtgagccgtttatttccgaacgtcaaggaaacgctggacaaactgaaagcccggggatttatacttgccgtcgtcaccaataaaccgactcagcacgttcaaccggtgttgaaagccttcggcatcgatcattttttcagcgaagccttaggcggtcaatccttgccggcaattaaaccgcatcccgctccgctttactatttatgcggaaaattcggtttctacccgcatcaggttctgtttgtgggcgattcccgcaacgatattctcgccgctcgcgcagcaggctgccctgccgtcggcttaacttacggctataactacaacattcccatcgcggaaagcaaaccggattgggtattggacgattttgcagaaattctgaatatcgtgtaa

SEQ ID NO: 157527 - protein, 224 aa, Actinobacillus succinogenes 130Z
MASQFKLIGFDLDGTLVNSLPDLALSVNSALAEFGLPQAPEPLVLTWIGNGADVLISRGVEWASVQSGTTLSEEETVQLKARFNHFYGENLCNVSRLFPNVKETLDKLKARGFILAVVTNKPTQHVQPVLKAFGIDHFFSEALGGQSLPAIKPHPAPLYYLCGKFGFYPHQVLFVGDSRNDILAARAAGCPAVGLTYGYNYNIPIAESKPDWVLDDFAEILNIV

SEQ ID NO: 157528 - DNA, 672 bp, Janthinobacterium sp. Marseille
  CDS (1)..(672): transl_table=11
atgttgcatggcatacgcggtgtcattatcgatctcgacggcaccatgctgcataccgcgcaggacttgcacattgccatcaatcgcatgcgcgcaggcctgggcctggcacctttggacctcgatacagcgatcagctttgtcggcaagggtgcagagaacctggtgcgcaagaccataggcgtcgatttctccgatagtgaggtcgaacagcgtttcgcggaagccatggccctgttcgagcagcattatttcgatgtgaatggcgaattcgccaccgcttaccccggtgtgcatgaaggtttgcaggaaatgcaggccaaaggtttgcgcctggcctgcgtcaccaataagcccatcgccttcacgctgccactgttgaaaaagaccggcctgcacgattactttgaaatcatttacggcggcgactcctttgcgaaaaagaagccggaccccatgcaattgctgcaggtctgcgccgattttgagctggcaccagcgcaaatcgtcgccatcggcgattcgatcaacgactcgcaggccgcacgggctgcgggttgcaaggtactcgcggtaccgtatggctacaaccacgggcaggctatacaagacgtcgattcggatggtatagtttcttcgctgctggaagcagctcatctaatttcatcataa

SEQ ID NO: 157529 - protein, 223 aa, Janthinobacterium sp. Marseille
MLHGIRGVIIDLDGTMLHTAQDLHIAINRMRAGLGLAPLDLDTAISFVGKGAENLVRKTIGVDFSDSEVEQRFAEAMALFEQHYFDVNGEFATAYPGVHEGLQEMQAKGLRLACVTNKPIAFTLPLLKKTGLHDYFEIIYGGDSFAKKKPDPMQLLQVCADFELAPAQIVAIGDSINDSQAARAAGCKVLAVPYGYNHGQAIQDVDSDGIVSSLLEAAHLISS

SEQ ID NO: 157530 - DNA, 678 bp, Sulfurovum sp. NBC37-1
  CDS (1)..(678): transl_table=11
ttgaaacttcataacaaagaactcatactattcgacctggacggtacacttatagacagtgtacctgacctgacgcttgcggtcaatgaaatgctcagtgcacttggcagaaagaccttccctgaggatacggtacggtactgggtgggtaacggagcccaaatgctggtcaaacgtgccctgctgggaacaagagaaacagacgaagaggtggatgaagtactgttcgagaaggcaatggccctttttctggacttctatgcaaaacatctggcagaaagtacggtcacctaccctcatgtggaagagacactccgcagcctgaagaagaacggctacagacttgccgtcattaccaacaaaccttttgccttcgttggtccgatcctgcaaaatctgggtctggatgacctctttgagctgatcctgggcggcgactctctgccccaaaagaaacctgaccccgcaccgcttctgcatacctgtcagacactgggagtaagcgtagaacaatcccttatggtcggagactccaaaaacgacattcttgcagccaatactgccggtatgcagagtatcggtgtgacctacggctacaattatggtgaagatatcgctgtctacggaccggatgccatcgtggatgactttgccgatattttaaactttttaatgtag

SEQ ID NO: 157531 - protein, 225 aa, Sulfurovum sp. NBC37-1
MKLHNKELILFDLDGTLIDSVPDLTLAVNEMLSALGRKTFPEDTVRYWVGNGAQMLVKRALLGTRETDEEVDEVLFEKAMALFLDFYAKHLAESTVTYPHVEETLRSLKKNGYRLAVITNKPFAFVGPILQNLGLDDLFELILGGDSLPQKKPDPAPLLHTCQTLGVSVEQSLMVGDSKNDILAANTAGMQSIGVTYGYNYGEDIAVYGPDAIVDDFADILNFLM

SEQ ID NO: 157532 - DNA, 759 bp, Cronobacter sakazakii ATCC BAA-894
  CDS (1)..(759): transl_table=11
atggataagctgcaaaaaatccgcgctgtcgctttcgatctcgacggtacgctggtagacagcgcgccgggcctgacctgggcggtggacaacgcgctctatgcgctggaactgccgaccgcgggcgacgcgcgcgtcattacctggattggcaacggtgccgatgtgcttatcgagcgcgcgctgacctgggcgcgtcaggagaaagccgcgcttcgcgccgccgcgggtaaacctgcgcaaaccgacgacatcccggaagaagagcagcgccgcatgatgcgccgtctgtttgaccgctattatggcgaggccgtcgaggcgggcagcgcgctgttcccggatgtggccgagacgctagacgcgctgcgccgtcatggtctcgtgctcgggctggtcaccaataagccgacgccgtttgtggccccgatgctggaatcgctcggtatcgcagaccatttcagcattattattggcggcgatgatgtgcagaataaaaaaccgcacccggagccgcttctgaaagttatggacgcgttgcaggtgacagcgcaggagttgctctttgtcggcgattcacgcaatgatattcaggcggcgcaggccgctggctgcgcaagcgtcggcctgagctatggctataactacggtgaagcgataacgttaagccacccggatttcgtctttgaccatttccgcgacttactgcccgcgttcgggctcccccacagtgacaatcaggaattgaaaaatgagtaa

SEQ ID NO: 157533 - protein, 252 aa, Cronobacter sakazakii ATCC BAA-894
MDKLQKIRAVAFDLDGTLVDSAPGLTWAVDNALYALELPTAGDARVITWIGNGADVLIERALTWARQEKAALRAAAGKPAQTDDIPEEEQRRMMRRLFDRYYGEAVEAGSALFPDVAETLDALRRHGLVLGLVTNKPTPFVAPMLESLGIADHFSIIIGGDDVQNKKPHPEPLLKVMDALQVTAQELLFVGDSRNDIQAAQAAGCASVGLSYGYNYGEAITLSHPDFVFDHFRDLLPAFGLPHSDNQELKNE

SEQ ID NO: 157534 - DNA, 687 bp, Vibrio harveyi ATCC BAA-1116
  CDS (1)..(687): transl_table=11
atgactcaacaagacattaaattcattgcctttgacctagacggtactttgcttgatagcgtaccggatctagcggttgcggcagaccaagccgttcaagcacttggttttccttctgtttcagaagagcaagtccgtgattatgtgggcaacggcgcagacgtgttgatcggtcgtgcattgagccagagcttaaccatcaacccagatctgaatgcagagcttcgtactaaagcacgtgtactgtttgatgactactatgatcaaagcggtcacaaactaagccacctttacccaacggtaaaagagacactggaagagttacacaaagccggctttgttatggcattggtaaccaacaagccttcgaagtttgtgcctgatgttttagaaaagcacgacatcgcaaaatactttgttgatgtgctaggtggcgatgcgttcccagagaaaaaaccaaacccaatcgcactgaactggttgatggaaaagcaccaaatccaaccaagtgaaatgctgatggtcggtgactcgaagaacgacattcttgcagcgaagaacgcaggttgcgcctcatttggtctgacttatggttacaaccatggcgagccaatttcagcgtcaaatccagatttcgtcgctgacagtttggcagaattattggacgttgtagcggtttctgcataa

SEQ ID NO: 157535 - protein, 228 aa, Vibrio harveyi ATCC BAA-1116
MTQQDIKFIAFDLDGTLLDSVPDLAVAADQAVQALGFPSVSEEQVRDYVGNGADVLIGRALSQSLTINPDLNAELRTKARVLFDDYYDQSGHKLSHLYPTVKETLEELHKAGFVMALVTNKPSKFVPDVLEKHDIAKYFVDVLGGDAFPEKKPNPIALNWLMEKHQIQPSEMLMVGDSKNDILAAKNAGCASFGLTYGYNHGEPISASNPDFVADSLAELLDVVAVSA

SEQ ID NO: 157536 - DNA, 759 bp, Citrobacter koseri ATCC BAA-895
  CDS (1)..(759): transl_table=11
atggataaattgcaggatattcggggtgtcgcctttgacctcgacggcacgctggttgacagcgcgccgggattagccgctgcggtagatatggcgttatacgcgctggaactgcctaccgctggcgaagatcgcgtaattacctggattggtaacggcgcggatgtattgatggagcgtgcgctcgcctgggctcgccaggaacgcgctacgttacgtaaaacaatgggcaaaccgcctgttgatgatgagatccccgccgaggagcaggtgcgtattttgcgtaagctgttcgaccgctactatggcgatgtggcggaagaagggacgttcctgttcccgcacgtagccgatacgctgggcgcgctgcatgccaaagggctgccgcttggactggtgaccaataagccgacgccgtttgtggcgccgctgcttgaagcgctggatatcgccaaatacttcagcgtggttattggcggcgacgatgtgcagaacaaaaagccgcatcccgatccgctgctgctggtggcaaagcggatgggcgtcgcgcctgaacagatgctcttcgtgggcgattcgcgtaatgacattcaggctgcaaaagcggctggctgcccgtcagtcggcctcacgtacggctacaactatggcgaatccatcgctcttagccagccggatgtgatttacgacactattaatgaccttctgcccgctctcgggcttccgcatagcgaaaatcaggaatcgaaaaatgactaa

SEQ ID NO: 157537 - protein, 252 aa, Citrobacter koseri ATCC BAA-895
MDKLQDIRGVAFDLDGTLVDSAPGLAAAVDMALYALELPTAGEDRVITWIGNGADVLMERALAWARQERATLRKTMGKPPVDDEIPAEEQVRILRKLFDRYYGDVAEEGTFLFPHVADTLGALHAKGLPLGLVTNKPTPFVAPLLEALDIAKYFSVVIGGDDVQNKKPHPDPLLLVAKRMGVAPEQMLFVGDSRNDIQAAKAAGCPSVGLTYGYNYGESIALSQPDVIYDTINDLLPALGLPHSENQESKND

SEQ ID NO: 157538 - DNA, 759 bp, Escherichia coli E24377A
  CDS (1)..(759): transl_table=11
atgaataagtttgaagatattcgcggcgtcgcttttgatcttgatggtacgctggtcgacagtgctcccggtcttgctgctgcggtagatatggcgctgtatgcgctggagttgcccatcgcaggtgaagaacgcgttattacctggattggtaacggcgcagatgttctgatggagcgcgcattgacctgggcgcgtcaggaacgtgcgactctgcgtaaaacaatgggtaaaccgcccgttgatgacgacattccggcagaagaacaggtacgtattctgcgtaaactgttcgatcgctactatagcgaggttgccgaagaggggacgtttttgttcccgcacgttgccgatacgttgggcgcgttgcaggctaaaggcctgccgctaggcctggtcaccaacaaaccgacgccgttcgtcgcgccgctgctcgaagccttagatattgccaaatactttagcgtggttatcggcggcgatgatgtgcaaaacaaaaaaccgcatccggacccgctgttactggtggctgagcggatgggaattgccccacaagagatgctgtttgtcggcgactcacgcaatgatattcaggcggcaaaagcggcaggttgcccatcagttggcttaacctacggatataactacggcgaggctatcgatctcagccagcctgatgtaatttatcagtctataaatgaccttctgcccgcattagggcttccgcatagcgaaaatcaggaatcgaaaaatgactaa

SEQ ID NO: 157539 - protein, 252 aa, Escherichia coli E24377A
MNKFEDIRGVAFDLDGTLVDSAPGLAAAVDMALYALELPIAGEERVITWIGNGADVLMERALTWARQERATLRKTMGKPPVDDDIPAEEQVRILRKLFDRYYSEVAEEGTFLFPHVADTLGALQAKGLPLGLVTNKPTPFVAPLLEALDIAKYFSVVIGGDDVQNKKPHPDPLLLVAERMGIAPQEMLFVGDSRNDIQAAKAAGCPSVGLTYGYNYGEAIDLSQPDVIYQSINDLLPALGLPHSENQESKND

SEQ ID NO: 157540 - DNA, 699 bp, Serratia proteamaculans 568
  CDS (1)..(699): transl_table=11
atggctgattttggagccatccgcgctctggctttcgatctcgatggcacgctggtagacagcgcgccggggttggctgccgctatcgatctggccttggcggaaatgggcctgccgcaggccggtgaggcccgggttggcacctggattggcaacggcgccgacgtgctggtacagcgtgcgctgcgctgggcagaagtggaagccacgccggagcactgcgggcaactgcgcgagcgcttcgatcatttctatgcgcaaaccgtcgacagcggcagtcgcctgttcccacaggtgaaagaaaccctggctcaactggctgcgcaaaattacccgatggcgctggtgaccaacaagccaacgccgtttgttgcgccgttgctggccgcattgggcattattgattacttctcgctgattatcggcggtgacgacgtggtggaaaagaaaccgcacccggcgccgctgtatctggtcctcggcaagcttggcctgcgcgccaacgagttgctgtttgtcggcgactcccgcaatgatattcaggcggcacagggggcaggttgcccaagcgccgcgctgacttacggttataactacggcgaggccattgccctgagccatcccgaccgcgtgttggagcgctttgccgatttgttgcccgctcttgggctgtcatctttagagaatcaggaaatttaa

SEQ ID NO: 157541 - protein, 232 aa, Serratia proteamaculans 568
MADFGAIRALAFDLDGTLVDSAPGLAAAIDLALAEMGLPQAGEARVGTWIGNGADVLVQRALRWAEVEATPEHCGQLRERFDHFYAQTVDSGSRLFPQVKETLAQLAAQNYPMALVTNKPTPFVAPLLAALGIIDYFSLIIGGDDVVEKKPHPAPLYLVLGKLGLRANELLFVGDSRNDIQAAQGAGCPSAALTYGYNYGEAIALSHPDRVLERFADLLPALGLSSLENQEI

SEQ ID NO: 157542 - DNA, 759 bp, Salmonella enterica subsp. arizonae serovar 62:z4,z23:--
  CDS (1)..(759): transl_table=11
atggataagttgcagaatattcggggcgtcgccttggatcttgacggtacgctggtggatagcgcgccgggtttagccgcagcggtcgacatggcgctgtatgcgctggaactgccggttgctggtgaagaacgcgtaattacctggattggtaacggcgccgatgtattgatggagcgcgcgcttgcctgggcgcgtcaggaacgtgccgcgttgcgtaaaacaatgggcaaaccacctgttgatgatgatatccctgcggaagagcaggtacgtattttgcgtaagttgtttgaccggtactatggtgttgtggcggaggaggggacgttcctgtttccgcacgtagccgacacgctgggcgcgctgcacgctaacggattgccgttaggtctggtgaccaataaaccgacgccatttgtagcaccgctgcttgaagcgttggacattgccaaatactttagcgtggtcatcggtggtgacgacgtacaaaacaaaaagccacatccggatccgttgctgctggtagctagccgaatgggtattgcgccagagcagatgctttttgtcggcgattcccgtaatgatattcaggctgcaaaagcggctggctgcccttcggttggcctgacatacggctacaattatggcgaagcgatctcccttagcgagccggacgtcatttatgacagttttaacgatattctgcccgcacttgggcttccgcatagcgataaccaggaaataaaaaatgactaa

SEQ ID NO: 157543 - protein, 252 aa, Salmonella enterica subsp. arizonae serovar 62:z4,z23:--
MDKLQNIRGVALDLDGTLVDSAPGLAAAVDMALYALELPVAGEERVITWIGNGADVLMERALAWARQERAALRKTMGKPPVDDDIPAEEQVRILRKLFDRYYGVVAEEGTFLFPHVADTLGALHANGLPLGLVTNKPTPFVAPLLEALDIAKYFSVVIGGDDVQNKKPHPDPLLLVASRMGIAPEQMLFVGDSRNDIQAAKAAGCPSVGLTYGYNYGEAISLSEPDVIYDSFNDILPALGLPHSDNQEIKND

SEQ ID NO: 157544 - DNA, 759 bp, Salmonella enterica subsp. enterica serovar Paratyphi B str. SPB7
  CDS (1)..(759): transl_table=11
atggataagttacagaatattcggggcgtcgcctttgatcttgacggtacgctggtggatagcgcgccgggtcttgccgcggcggtggatatggcgctgtatgcgctggaactgccggtcgcgggcgaggagcgcgtgattacctggattggtaacggcgcagacgtattgatggaacgcgcgctggcctgggctcgcgaggagcgcgccacgctgcgtaagacgatggggaaaccgcccgttgatgaagatattcctgccgaggaacaggtacgcattctgcgtaaactgttcgacaggtattatggcgaagtggcggaagagggcacttttttatttccgcatgtcgccgacacgctgggcgcgctgcacgccagcggattgtcattaggtctggtgacgaataagccgacgccgttcgtcgcgccgttgctggaatcgcttgatatcgccaaatactttagtgtggttatcggcggcgatgatgtgcaaaataagaagccgcatccggagccgctgttgctggtggcaagccggctgggcatgatgccggagcagatgctttttgtcggcgattcgcgtaatgatattcaggctgcaaaagcggcgggctgcccttcggttggcctgacatacggctacaattatggcgaagcgatcgctcttagcgagccggacgtcatttatgacagttttaacgatcttttgcccgcacttgggcttccgcatagcgataaccaggaaataaaaaatgactaa

SEQ ID NO: 157545 - protein, 252 aa, Salmonella enterica subsp. enterica serovar Paratyphi B str. SPB7
MDKLQNIRGVAFDLDGTLVDSAPGLAAAVDMALYALELPVAGEERVITWIGNGADVLMERALAWAREERATLRKTMGKPPVDEDIPAEEQVRILRKLFDRYYGEVAEEGTFLFPHVADTLGALHASGLSLGLVTNKPTPFVAPLLESLDIAKYFSVVIGGDDVQNKKPHPEPLLLVASRLGMMPEQMLFVGDSRNDIQAAKAAGCPSVGLTYGYNYGEAIALSEPDVIYDSFNDLLPALGLPHSDNQEIKND

SEQ ID NO: 157546 - DNA, 819 bp, Pseudomonas putida GB-1
  CDS (1)..(819): transl_table=11
atgagtggcttcgagcagctgttcccggggacgctgccgaggctggtgatgttcgatctggacggtaccctgatcgactccgtgccagacctggccgccgccgtggaccgtatgctgctcgaactggggcgcccgcctgcaggccttgaggccgtgcgccactgggttggtaatggtgcccaggtgctggtgcgtcgggcgttggccggaggcatcgaccacaccacagtggacgacgccctggccgagcaggcgctggcgctgttcatggacgcctatgccgaaagccatgagctgacggtggtctaccccggcgtgcgggacaccctgcgctggctgcgcaagcagggtgtggagatggcgctgattaccaacaagcctgagcgcttcgttggcccgctgctggaccagatgaagatcggcaactacttccgctggatcatcggcggtgacaccctgccgcagaagaagcccgacccggcggcgctgctgttcgtcatgcagatggccggtgttactccgcagcagtcgctgtttgtcggcgattcgcgcagtgacgtgctggccgccaaggcagctggtgtgcaatgcgtgggcctgacctacggctacaaccatggccggccgatcaacgacgaatcccccaacctggtgatcgacgatctgcgcgctttgctgcctggttgcgcagacccggccactgggataacgttggcgaaccttcaagcctcacaagacagagagcccaccgtggtggttaccggcaaattctggatgaaagtcatcaaggccctggcccgttggcgttggcgcgcctga

SEQ ID NO: 157547 - protein, 272 aa, Pseudomonas putida GB-1
MSGFEQLFPGTLPRLVMFDLDGTLIDSVPDLAAAVDRMLLELGRPPAGLEAVRHWVGNGAQVLVRRALAGGIDHTTVDDALAEQALALFMDAYAESHELTVVYPGVRDTLRWLRKQGVEMALITNKPERFVGPLLDQMKIGNYFRWIIGGDTLPQKKPDPAALLFVMQMAGVTPQQSLFVGDSRSDVLAAKAAGVQCVGLTYGYNHGRPINDESPNLVIDDLRALLPGCADPATGITLANLQASQDREPTVVVTGKFWMKVIKALARWRWRA

SEQ ID NO: 157548 - DNA, 699 bp, Shewanella halifaxensis HAW-EB4
  CDS (1)..(699): transl_table=11
atgaatacttttagtcaaataaaagcggtagcatttgacttggatggaacgctaatcgatagcgttcccgatcttgctgcagcgactcgtgcaaccctagaagagttagcattgcctttgtgcagtgatgaacaggtccgtagctgggtaggcaatggcgccgaaatgctgatgcgcagagctctctcttttgcacttaatactgcagtgacggaagagcagctacaagcttgtatgccaaaatttatgcatttctatgggctcaatctgcaacaacatagtcagttgtatcccggcgttgaatctgttctagagcagttgcaacaagccggttaccgcatggcgattgttactaataagccctatgagtttaccctgccactgcttaaagcatttaatattgatgcttacttcagcatggtacttggtggcgactctttatctaagatgaaacccgatccactgccactacagcacattttgcacgagtggcgcctcgaaactgagcaattattgatggtcggtgactcaaagaacgatatattagcggcaaaatcggctaaggttgcctctgtgggcttgacctacggctacaactacggtgaagatattgggctaagcggccctgacgccgtatgtgaacaatttagtgaaataaccgcgctacttaaattgcgcgataaagcaacggagcaataa

SEQ ID NO: 157549 - protein, 232 aa, Shewanella halifaxensis HAW-EB4
MNTFSQIKAVAFDLDGTLIDSVPDLAAATRATLEELALPLCSDEQVRSWVGNGAEMLMRRALSFALNTAVTEEQLQACMPKFMHFYGLNLQQHSQLYPGVESVLEQLQQAGYRMAIVTNKPYEFTLPLLKAFNIDAYFSMVLGGDSLSKMKPDPLPLQHILHEWRLETEQLLMVGDSKNDILAAKSAKVASVGLTYGYNYGEDIGLSGPDAVCEQFSEITALLKLRDKATEQ

SEQ ID NO: 157550 - DNA, 669 bp, Acinetobacter baumannii SDF
  CDS (1)..(669): transl_table=11
atgtctgttgcacaactaagtaagcgcgatttaattttatttgacctagatggaacgttggttgactccgctgccgatttatatcggtctatgaacttaagtctgcaatccctcagttggccattggtaacagaagcacaaatacgggaatgggtaggtaaaggggcttcaaaactttgtgaaagtgttctgcttcatatatttggaaaattagatgttgaacaacataaagctttattacagaaatttgtagaggtatatggtgcggagctgtgtgtgaatactcaaatttacccaggcgtacctgagtttttaaaacattgccaaactttgaatattaaaatggcatgtgtgactaataagcctgtcaaacttgctcaagggttactggatgcgctagagctttcttcttattttcaagttgtacttggaggagatagcttacctgaaagaaagccgcacccactaccattattgcattgcatggaaagcctaaaaatatctgcttcacaatcattaatgattggcgactcaagtaatgatattgaagctgcacgccgtgctggaattgattgtattgtggttagctatggctataatcatggagagaatatctatgattgccaacctcagcaagttgttgatagtcttgctgagttaattgtctaa

SEQ ID NO: 157551 - protein, 222 aa, Acinetobacter baumannii SDF
MSVAQLSKRDLILFDLDGTLVDSAADLYRSMNLSLQSLSWPLVTEAQIREWVGKGASKLCESVLLHIFGKLDVEQHKALLQKFVEVYGAELCVNTQIYPGVPEFLKHCQTLNIKMACVTNKPVKLAQGLLDALELSSYFQVVLGGDSLPERKPHPLPLLHCMESLKISASQSLMIGDSSNDIEAARRAGIDCIVVSYGYNHGENIYDCQPQQVVDSLAELIV

SEQ ID NO: 157552 - DNA, 759 bp, Escherichia coli SMS-3-5
  CDS (1)..(759): transl_table=11
atgaataagtttgaagatattcgcggcgtcgcttttgatctcgatggtacgctggtggacagtgctcctggcttggctaccgcagtagatatggcgctgtatgcgctggagttgcccgtcgcaggtgaagaacgcgttataacctggattggtaacggcgcagatgttctgatggagcgcgcattgacctgggcgcgtcaggaacgtgcgactctgcgtaaaacaatgggtaaaccgcccgttgatgacgacattccggcagaagaacaagtacgtattctgcgtaaactgttcgatcgctactatggcgaggttgccgaagaggggacgtttttgttcccgcacgttgccgatacgctgggcgcattgcaggctaaaggcctgccgctaggtctggtcaccaacaaaccgacgccgttcgtcgcgccgctgctcgaagccttagatatcgccaaatacttcagcgtggtaattggtggtgatgatgtgcaaaacaaaaaaccgcatccggacccgctgttactggtggctgagcggatgggaattgctccacaacagatgctgtttgttggcgactcacgcaatgatattcaggcagcaaaagcggcaggttgcccatcagttggcttaacctacggatataactacggcgaggctatcgatctcagccagcctgatgtaatttatcagtctataaatgaccttctgcccgcattagggcttccgcatagcgaaaatcaggaatcgaaaaatgactaa

SEQ ID NO: 157553 - protein, 252 aa, Escherichia coli SMS-3-5
MNKFEDIRGVAFDLDGTLVDSAPGLATAVDMALYALELPVAGEERVITWIGNGADVLMERALTWARQERATLRKTMGKPPVDDDIPAEEQVRILRKLFDRYYGEVAEEGTFLFPHVADTLGALQAKGLPLGLVTNKPTPFVAPLLEALDIAKYFSVVIGGDDVQNKKPHPDPLLLVAERMGIAPQQMLFVGDSRNDIQAAKAAGCPSVGLTYGYNYGEAIDLSQPDVIYQSINDLLPALGLPHSENQESKND

SEQ ID NO: 157554 - DNA, 819 bp, Pseudomonas putida W619
  CDS (1)..(819): transl_table=11
atgagcggcttcgagcagctgttccccgggacgctgcccaggctggtgatgttcgatctggacggtaccctgatcgattcagtccccgacctggccgcagccgttgaccgcatgctgctcgaacttggccgtccggccgccggccttgacgccgtgcggcactgggtcggcaacggcgcaccggtgctggtgcgccgcgcacttgccggcggcctggaccacgcgaccgtagacgatgagctggccgagcgcggccttgcactgttcatggaggcgtacgccgaaagccatgatctaacggttgtataccctggtgtgcacgacaccttgcgctggctgcgcaagcagggcgtggagatggcgctgatcaccaacaagcctgaacgcttcgtcgcaccgttgctcgaccagatgaagatcggccgttatttccgctggatcatcggcggcgataccctgccacagaagaagcccgatcctgctgcgttgctgttcgtcatgaaaatggccggcgtgaagcccggccaggcgctgtttgtgggggactcgcgcagtgatgtgctggcggccaaggctgccggcgtgcagtgcgttgggctgagctatggctataaccacggccggccgatcgatgaggaagcgcccagcctggtcataggcgacctgcgcctgctgctgcctggttgcgtagtcaccgacactgggataacgttggcggaccttcaagcctcacaagacagagagcccaccgtggtggttaccggcaaattctggatgaaagtcatcaaggccctggcccgttggcgttggcgcgcctga

SEQ ID NO: 157555 - protein, 272 aa, Pseudomonas putida W619
MSGFEQLFPGTLPRLVMFDLDGTLIDSVPDLAAAVDRMLLELGRPAAGLDAVRHWVGNGAPVLVRRALAGGLDHATVDDELAERGLALFMEAYAESHDLTVVYPGVHDTLRWLRKQGVEMALITNKPERFVAPLLDQMKIGRYFRWIIGGDTLPQKKPDPAALLFVMKMAGVKPGQALFVGDSRSDVLAAKAAGVQCVGLSYGYNHGRPIDEEAPSLVIGDLRLLLPGCVVTDTGITLADLQASQDREPTVVVTGKFWMKVIKALARWRWRA

SEQ ID NO: 157556 - DNA, 708 bp, Shewanella woodyi ATCC 51908
  CDS (1)..(708): transl_table=11
atggcctcctgggataagcttaaagcgatagcgttcgaccttgatggcacacttatcgatagtgcgccagatctcgcggctgcaactcaagcgactcttactgagttgaaactgcctagttgcagtgaagagcaagtgagatcttggataggtaatggcgctaaggtgttaatgcaaagggcattaactcactctctagacaggcctgtagaagcggatatgttagaagatactatgccgctttttatgaaacattatcaagagaatttagagcaacatagtcaactttatcccggagttcttgaggtactcaatgagctaacatcacttgggtactccatggcggttgtgaccaataaaccctaccgatttgccattccacttttaaaagcgtttaagatagagcatcactttaccaaggtgcttggtggggactctcttgaaaagatgaagcctgatcctttgccgttaactcacctgctcgataagtggaagcttaaacctgaagcgcttttgatggtcggcgactctaaaaatgacattttagcggcaaaagcagcaggtattagctcgataggcttgacctatgggtataactacggtgaagatatcgggctaagctgtcccgacgctgtttgtgtccagtttagtgaaattttaaaattcgtaaataacagtgtaaaagtaatggagcatgagagcgtatga

SEQ ID NO: 157557 - protein, 235 aa, Shewanella woodyi ATCC 51908
MASWDKLKAIAFDLDGTLIDSAPDLAAATQATLTELKLPSCSEEQVRSWIGNGAKVLMQRALTHSLDRPVEADMLEDTMPLFMKHYQENLEQHSQLYPGVLEVLNELTSLGYSMAVVTNKPYRFAIPLLKAFKIEHHFTKVLGGDSLEKMKPDPLPLTHLLDKWKLKPEALLMVGDSKNDILAAKAAGISSIGLTYGYNYGEDIGLSCPDAVCVQFSEILKFVNNSVKVMEHESV

SEQ ID NO: 157558 - DNA, 774 bp, Burkholderia phymatum STM815
  CDS (1)..(774): transl_table=11
atgcaagtcatgccgcgcaatttgccgatcgatgccgtgctgttcgatctcgacggcacgctgttgcatacatcgccggatatcggcaatgcgctcaaccgcgcactggccgaaaacggccttccgctgctcgcgccaggcgtcgcgcagacgctgatcggcggcggctccgaaattctcgtcgaccgcgcgttgacgctgctgggcgtcgagtcgcgacccgcgacgctcgatctcgtgctgcgccgttacgagtcctgctatcaccagatctgccgcggcgaggaccagttgacgcagccgtatcccggcgctgaagcgacgctggacagcctgcgcggcatgggactcaagctcggtctcgtcaccaacaaggagacgcgtttcgtcgatccgctgatgtggcgcttcggtttgcaggcatggttcgacatggtcgtcgacggcaacgcgcggctgccgcgcaagccggatcccgaaccgctgctgcacgcatgcgaagcgctcggtgtcgatcccgcgcacacgcttttcgtcggcgattcggtgacggacgccctcgcggcgcaggctgcgggaatgccgatggtctgcgtcagctacggatacagcagcgatcatcccgtgaccgaactgccgtgcatgcgcgtgatcgacagcatcggcgaattgacggagctgatcggcggtccccgcaaatggcatcgtccgacacgcggcgatcacgctgccgcggggatggacatgcagatgcactcgcacctggcgaactga

SEQ ID NO: 157559 - protein, 257 aa, Burkholderia phymatum STM815
MQVMPRNLPIDAVLFDLDGTLLHTSPDIGNALNRALAENGLPLLAPGVAQTLIGGGSEILVDRALTLLGVESRPATLDLVLRRYESCYHQICRGEDQLTQPYPGAEATLDSLRGMGLKLGLVTNKETRFVDPLMWRFGLQAWFDMVVDGNARLPRKPDPEPLLHACEALGVDPAHTLFVGDSVTDALAAQAAGMPMVCVSYGYSSDHPVTELPCMRVIDSIGELTELIGGPRKWHRPTRGDHAAAGMDMQMHSHLAN

SEQ ID NO: 157560 - DNA, 678 bp, Erwinia tasmaniensis Et1/99
  CDS (1)..(678): transl_table=11
atggggcatttcactgattaccgtgcgctggctttcgatctggacggtacgctgacagacagcgcaccgggacttgccagcgccgtagacggtgcgttaaccgagttaaacctgcccgccgctggcgttgcgcgcgtgtcgacctggattggtaacggcgcagatattcttatcgagcgcgcattgagctgggcgctgggccatgccccacaggctgatttactgcgtgaaggccgccagctgctggacaaacattacgcgaacagtgcggacggcggtagccagctttatccgggggtaaaagagacgcttgcctcgctggctgaacgcgccgtgcctatggctctggtcactaacaagcccaccccttttgtcgctccgctgctgcagtcgctgggtattgctgactatttctcactggtgatcggtggcgatgatgtggtggcgaagaagccgcacccggcgccgctgttcctggtgcttggccaaatgggcctgttgccgggtgagctggtgtttgttggtgattcacggaatgatattctggcggcacaggcggcgggatgtccctgtatcggcatgacttatggctataactacggcgagtcaatcgtcgccagccagcctgacctcacactcgatcattttaacgatttgttgcccgcactcgggctgtaa

SEQ ID NO: 157561 - protein, 225 aa, Erwinia tasmaniensis Et1/99
MGHFTDYRALAFDLDGTLTDSAPGLASAVDGALTELNLPAAGVARVSTWIGNGADILIERALSWALGHAPQADLLREGRQLLDKHYANSADGGSQLYPGVKETLASLAERAVPMALVTNKPTPFVAPLLQSLGIADYFSLVIGGDDVVAKKPHPAPLFLVLGQMGLLPGELVFVGDSRNDILAAQAAGCPCIGMTYGYNYGESIVASQPDLTLDHFNDLLPALGL

SEQ ID NO: 157562 - DNA, 690 bp, Cupriavidus taiwanensis
  CDS (1)..(690): transl_table=11
atgagcgcggggttcgcatccgcagggttcgcaggcgtcttcttcgacctcgacggcacccttgccgacaccgcgccggacctggccgcggcggcgaaccggctggtcatcgaacgcggccgcccgccggtggcttacgacaagctgcgtccggtggcatcacacggcgcgcgcggattgctgggcgccgccttcggcctgcggccggaagatgcggagtttcctgcgctgcgcgataccttcctggattactacgaggccgacatcgcggttcacacccgcctgttcgacggcatgccgcaggtactggccgcgctcgaggccgcaggcatcccgtgggggatcgtgaccaacaagatcgcgcgcttcacggtgccgctggtcgccgcgatcgggctggcgccccgcgccagtgccgtggtcagcggcgacaccacgccgcacgccaagccgcaccccgccccgctgctgcatgccgccgcgagtgccggcgtcgacccgcgccgctgcgtctatgtcggcgacgacctgcgcgacatccaggccggcaaggccgccggcatggtcaccgtgaccgccgcctatggctactgcggcgaaggggagccgcccgaggcctggggcgcggaccacctgatccgccacccgtcagagctgatcccgctgctggtgcccgccgcggtcgcctga

SEQ ID NO: 157563 - protein, 229 aa, Cupriavidus taiwanensis
MSAGFASAGFAGVFFDLDGTLADTAPDLAAAANRLVIERGRPPVAYDKLRPVASHGARGLLGAAFGLRPEDAEFPALRDTFLDYYEADIAVHTRLFDGMPQVLAALEAAGIPWGIVTNKIARFTVPLVAAIGLAPRASAVVSGDTTPHAKPHPAPLLHAAASAGVDPRRCVYVGDDLRDIQAGKAAGMVTVTAAYGYCGEGEPPEAWGADHLIRHPSELIPLLVPAAVA

SEQ ID NO: 157564 - DNA, 750 bp, Vibrio sp. Ex25
  CDS (1)..(750): transl_table=11
atgacatcaagattaagcacacaggatggggaaccatcctgtgttattttagctagggaatttatgacccaacaagatattaaattgattgcttttgatctggatggaacactgcttgatagcgtgccagatcttgccgtagcggccgatcaagcagttcaggcgttaggctatccttctgtatcagaagagcaggtgcgtgattacgttggtaatggtgcagatatattgattggacgtgcattaagccaaagcatgaccatcagcagtgatttgagtgatgagctgcgtgctaaagcgcgtgagctgtttgatgaatactacaagcaaagcggccataagctaagtcacctttacccaacagtaaaagagacgcttgaagagctacaccaagctggttttacgatggcgattgtgacgaacaagccctcgaaattcgtaccagaaattctagagcagcatgacatcgccaagtacttcgtagacgtattaggtggtgacgcgtttccagataaaaaaccaaacccggtggcgctgaactggctaatggaaaagcaccaggtaaaaccagcagagatgctgatggttggggattcgaaaaacgatatcttggcggcgaaaaatgcgggttgtgcttcatttggtttaacttacggttataaccacggcgagcccatttcagcttcgaaccctgacgtagtggcgaaccgcctcgcggaattactggaagtcgtcgctgtttctgcataa

SEQ ID NO: 157565 - protein, 249 aa, Vibrio sp. Ex25
MTSRLSTQDGEPSCVILAREFMTQQDIKLIAFDLDGTLLDSVPDLAVAADQAVQALGYPSVSEEQVRDYVGNGADILIGRALSQSMTISSDLSDELRAKARELFDEYYKQSGHKLSHLYPTVKETLEELHQAGFTMAIVTNKPSKFVPEILEQHDIAKYFVDVLGGDAFPDKKPNPVALNWLMEKHQVKPAEMLMVGDSKNDILAAKNAGCASFGLTYGYNHGEPISASNPDVVANRLAELLEVVAVSA

SEQ ID NO: 157566 - DNA, 678 bp, Alteromonas macleodii 'Deep ecotype'
  CDS (1)..(678): transl_table=11
atgttcatgcaagatattaatacctttctattcgacctagatggaacactagtagattctgtgccagatttagcgaaagccctgaacctgatgctaagtgattacaacctgccaacctatgaggaggcgaaagtaaggcactgggtgggcaatggcgctcgggttctggttgaaagaggtttgagcggtaatacaaaaattaaccacgcttttaaccaagtagaagttgatatcgcgctagacaaatttcttttctgttacagaacattagaaaccaaaagcaccgtgctttacgatggtgttgccgccacactcaaaactcttaaagcgcatggctgtactcttgcgttagtaacaaataaaccttcagagtttatagaaccaatccttacatcgttttcattgttgcccttgttttcaattaccattggcggtgacacgcttttagagaagaaaccctctcctttaccgcttatgcatgcctgtgaaaaattgggcgttttaccctctgaatgcgtaatggtaggcgattctaagaatgatattcttgccgctaaagccgcgaatataaaaagtataggccttacctatgggtacaattacggtgaaagtattgcgacctaccagcctgactgggtgttcgatagctttagcgacattctgtcgttgcgcgcttaa

SEQ ID NO: 157567 - protein, 225 aa, Alteromonas macleodii 'Deep ecotype'
MFMQDINTFLFDLDGTLVDSVPDLAKALNLMLSDYNLPTYEEAKVRHWVGNGARVLVERGLSGNTKINHAFNQVEVDIALDKFLFCYRTLETKSTVLYDGVAATLKTLKAHGCTLALVTNKPSEFIEPILTSFSLLPLFSITIGGDTLLEKKPSPLPLMHACEKLGVLPSECVMVGDSKNDILAAKAANIKSIGLTYGYNYGESIATYQPDWVFDSFSDILSLRA

SEQ ID NO: 157568 - DNA, 720 bp, Proteus mirabilis HI4320
  CDS (10)..(720): transl_table=11
ggtatcgaaatgacagaaaaaaaactcaaaggtattcgtgctatcgcttttgatcttgatggcacactaactgacagcgctgttgggctaacagaagccacaaactatgcactaaaagcaaaaggcttcccaacagtggataaacaccatgtcaccatttgggttggtaatggtgttgatatgctattaaagcgcgccctacaccattgtggtgttaaagatgtcaccgatactttattaaaagaggtacgtgatctctttgatgagtgctatgcaaactctgtcaaaacaggaagcaatctatttccacacgttaaagagacactagaaaaacttgcttcgtattctctctccttaggcatagtgacgaataaacctacgccttttatccaaccactgttaaagcaattaggtatagacaacgacttctcattggtgcttggtggtgatgatgtaaaacaaaaaaaaccccatccagcaccattatatttaacaatgggcacgtttggtgttaaaaaagaagagcttctttttgtcggagattcccgtaacgatattatcgccgcacaagcagcacagtgcccttgtgtggggttaacttatggttataactacggtgaacccattgcagatagcaaacccgattttatactcgacgattttgctgatttgctctctatccttgatattacgtcaatgacaacagtggaacagaactaa

SEQ ID NO: 157569 - protein, 236 aa, Proteus mirabilis HI4320
MTEKKLKGIRAIAFDLDGTLTDSAVGLTEATNYALKAKGFPTVDKHHVTIWVGNGVDMLLKRALHHCGVKDVTDTLLKEVRDLFDECYANSVKTGSNLFPHVKETLEKLASYSLSLGIVTNKPTPFIQPLLKQLGIDNDFSLVLGGDDVKQKKPHPAPLYLTMGTFGVKKEELLFVGDSRNDIIAAQAAQCPCVGLTYGYNYGEPIADSKPDFILDDFADLLSILDITSMTTVEQN

SEQ ID NO: 157570 - DNA, 714 bp, Burkholderia cenocepacia J2315
  CDS (1)..(714): transl_table=11
atgacgactcccctttcgaccgtgcggatcgccgacgaaccgcgcctgctgcactgcgatgcggtcctgttcgacctggacggcacgctcgccgacacggcgcccgatctcgcggcagccgtcaacaagatgcagcgcgaacgcggcctgcccgaaacgtcgctcgacgtgttgcggccgctggcctcggccggcgcgcgcgggctgctcggcggcgcgttcggtatcgacccgcacacgccgggctacgacgcgatgcgcgacgagttcctcgccaactacgcgaccgatctgtgcgtgcataccacgctgttcccgggtatcggcgacgtgctcgacgaactcgatgcgcgcggcgtgcgctggggcatcgtcacgaacaaggcgatgcggctcacggcaccgctcgtcgagctgctcggcctcgcgtcgcgcgccgcatgcgtcgtcgggggcgacacaacgccgcactcgaagccgcatccggccccgctgctgcatgcagccggccagctgacgctcgcgcccgcgcgcatcgtctacgtcggcgacgacctgcgcgacattcaggccggcagcgccgccggcatggccacggtcgcggccgcatacggctattgcggcgacggtatcgcgccgaccgactggcaggcccagcacctcgtcgacacgacgcaggaactgcgggacctgctgcgcgatgttgggctataa

SEQ ID NO: 157571 - protein, 237 aa, Burkholderia cenocepacia J2315
MTTPLSTVRIADEPRLLHCDAVLFDLDGTLADTAPDLAAAVNKMQRERGLPETSLDVLRPLASAGARGLLGGAFGIDPHTPGYDAMRDEFLANYATDLCVHTTLFPGIGDVLDELDARGVRWGIVTNKAMRLTAPLVELLGLASRAACVVGGDTTPHSKPHPAPLLHAAGQLTLAPARIVYVGDDLRDIQAGSAAGMATVAAAYGYCGDGIAPTDWQAQHLVDTTQELRDLLRDVGL

SEQ ID NO: 157572 - DNA, 762 bp, Klebsiella pneumoniae 342
  CDS (1)..(762): transl_table=11
atggataaattacaggcgatccgcggcatcgcgtttgatctcgacggcacgctggtggacagtgcgccgggtctaacctcggcggttgataacgccctctacgccctggagttgccggtggcgggagaagaacgcgttgtcacctggatcggcaacggcgccgatgtcctgatggaacgggcgctgacctgggctcgtcaggagcgtgcgacgttacgggcggcgatgggtaagccttccgtcgacgatcatgatattccgcaagacgaacagctgcgcattttgcgtaaactgtttgaccgctattacgccgaaacggcggaagagggtagcttcctgttcccggcggtggccgatacgctcggcgcgctgcatgccaaaggcctgccgctggcgctggtcaccaataagccgacaccgtttgtcgccccgctgctggacgcgctcgatatcgcgaaatattttaccgtggtgattggcggcgatgacgtgcagaacaaaaagccgcatccggaaccgctgctgctggtggcggaaaagctctctctggctcctgccgagctgctgttcgtcggcgattcgcgcaatgatattcaggcggccaaagcggcaggctgctgctctgtcggcctgacctacggttataactatggcgaaccgcttgcgctgagcgagccggactatctcttcgaccagtttaatgaactcttacccgctctcgggttaccgcacagtgaaactcaggaattgaaacatgactaa

SEQ ID NO: 157573 - protein, 253 aa, Klebsiella pneumoniae 342
MDKLQAIRGIAFDLDGTLVDSAPGLTSAVDNALYALELPVAGEERVVTWIGNGADVLMERALTWARQERATLRAAMGKPSVDDHDIPQDEQLRILRKLFDRYYAETAEEGSFLFPAVADTLGALHAKGLPLALVTNKPTPFVAPLLDALDIAKYFTVVIGGDDVQNKKPHPEPLLLVAEKLSLAPAELLFVGDSRNDIQAAKAAGCCSVGLTYGYNYGEPLALSEPDYLFDQFNELLPALGLPHSETQELKHD

SEQ ID NO: 157574 - DNA, 684 bp, Aliivibrio salmonicida LFI1238
  CDS (1)..(684): transl_table=11
atgtttgaaaacatcaaactgatcgcgtttgatttggatggaacactgctagatagtgttccagacttagctcgtgcggttgatcttgctatgcaagacctagattaccctggcgttacattagagcaagcttctcattggataggcaatggtgctgatgttttggtctctcgtgctttaagtcaaagtgtggtcgttgctgaaggtcttaatcttgagttggtaaaaacagctcgtgggcgtttagatcatcattaccatgagggtggccataagctgagccatctttacccaaacgtaaaagagacattagagtcgctatatcaggaagggtatacgctagcgcttgtgacgaataagcccgcgcaatttgttcctgaattattaaaacaacatcaacttgaacatttatttgttgatgttattggtggcgatacgtttgtcgagaagaagcctaatccattcgctttaaattggttactcgataagcatcatcttttgccgacgcaaatgttgatggtgggtgattctcaaaatgatattcaagccgctaaagccgctggttgttatagtttcggattaacttatggttataaccatggggaacctattgcagacagtgatcctgatgttgtgagtgatgaatttaatcatttattagccgtgatgagtgtggcaagatag

SEQ ID NO: 157575 - protein, 227 aa, Aliivibrio salmonicida LFI1238
MFENIKLIAFDLDGTLLDSVPDLARAVDLAMQDLDYPGVTLEQASHWIGNGADVLVSRALSQSVVVAEGLNLELVKTARGRLDHHYHEGGHKLSHLYPNVKETLESLYQEGYTLALVTNKPAQFVPELLKQHQLEHLFVDVIGGDTFVEKKPNPFALNWLLDKHHLLPTQMLMVGDSQNDIQAAKAAGCYSFGLTYGYNHGEPIADSDPDVVSDEFNHLLAVMSVAR

SEQ ID NO: 157576 - DNA, 759 bp, Escherichia coli SE11
  CDS (1)..(759): transl_table=11
atgagtaagtttgaagatattcgcggcgtcgcttttgatctcgacggtacgctggtggacagtgctcccggtcttgctgctgcggtagatatggcgctgtatgcgttggagttacccgtcgcaggtgaagaacgcgttattacctggattggtaacggcgcagatgttctgatggagcgtgcattggcctgggcgcgtcaggaacgtgcgactctgcgtaaaacaatgggtaaaccgcccgttgatgacgacattccggcagaagaacaggtacgtattctgcgtaaactgttcgatcgctactatagcgaggttgccgaagaggggacgtttttgttcccgcacgttgccgatacgttgggcgcgttgcaggctaaaggcctgccgctatgcctggtcaccaacaaaccgacgccgttcgtcgcgccgctgctcgaagccttagatattgccaaatactttagcgtggttatcggcggcgatgatgtgcaaaacaaaaaaccgcatccggacccgctgttactggtggctgagcggatgggaattgccccacaagagatgctgtttgtcggcgactcacgcaatgatattcaggcggcaaaagcggcaggttgcccatcagttggcttaacctacggatataactacggcgaggctatcgatctcagccagcctgatgtaatttatcagtctataaatgaccttctgcccgcattagggcttccgcatagcgaaaatcaggaatcgaaaaatgactaa

SEQ ID NO: 157577 - protein, 252 aa, Escherichia coli SE11
MSKFEDIRGVAFDLDGTLVDSAPGLAAAVDMALYALELPVAGEERVITWIGNGADVLMERALAWARQERATLRKTMGKPPVDDDIPAEEQVRILRKLFDRYYSEVAEEGTFLFPHVADTLGALQAKGLPLCLVTNKPTPFVAPLLEALDIAKYFSVVIGGDDVQNKKPHPDPLLLVAERMGIAPQEMLFVGDSRNDIQAAKAAGCPSVGLTYGYNYGEAIDLSQPDVIYQSINDLLPALGLPHSENQESKND

SEQ ID NO: 157578 - DNA, 705 bp, Rhodospirillum centenum SW
  CDS (1)..(705): transl_table=11
atgacttcccgtccggagccgaccgtccaggccttcccggccctggtcttcgatctggacgggaccctgctggacagcgttcccgacatcgggcaggcgctgaaccgcacgctgatggatctgggccggccgaccgtgtcgccggcccaggtgcggcgcttcgtcggcgatggcgtgcgccggctggtggagcgcgggctggaggcgaccggcggcctgcccgacgcgggggcgcaggacgccgccctcgaccgcttcatggccatctatggcgccatccccgccgatccggcctgcatcttccccggggtgctggacaccctgcgggcgctggccgcggcggggcacggccttgccgtctgcaccaacaagcccgaggcgatcacccgcgacctgctgcgcgacctcggcctgctggatctgctggccgccgtcgtcggcggcgacacgctgccccagcgcaagccggcgccggagccgctgctggcggctatcgcacgcatgggggcatcgccggccggggccctgatggtgggcgacagcgagaacgatgtcgccacggcgcgcgccgccggggtgcccgtcgtcgccgtcacctacggctattcccgcgtgccggtccccgagctgggggccgaccatgtgatcgaccgattcgatgcgttgcccggcgcgatcgcctccctggcgtcgcggcgggcctga

SEQ ID NO: 157579 - protein, 234 aa, Rhodospirillum centenum SW
MTSRPEPTVQAFPALVFDLDGTLLDSVPDIGQALNRTLMDLGRPTVSPAQVRRFVGDGVRRLVERGLEATGGLPDAGAQDAALDRFMAIYGAIPADPACIFPGVLDTLRALAAAGHGLAVCTNKPEAITRDLLRDLGLLDLLAAVVGGDTLPQRKPAPEPLLAAIARMGASPAGALMVGDSENDVATARAAGVPVVAVTYGYSRVPVPELGADHVIDRFDALPGAIASLASRRA

SEQ ID NO: 157580 - DNA, 759 bp, Escherichia coli O127:H6 str. E2348/69
  CDS (1)..(759): transl_table=11
atgaataagtttgaagatattcgcggcgtcgcttttgatctcgacggtacgctggttgacagtgcacccggtcttgctgctgcggtagatatggcgctgtatgcgctggagttgcctgtcgcaggtgaagaacgcgttattacctggattggtaacggcgcagatattctgatggagcgcgcattgacctgggcgcgtcaggaacgtgcgactctgcgtaaaacaatgggtaaaccgcccgttgatgacgacattccggcagaagaacaggtacgtattctgcgtaaactgttcgatcgctactatggcgaggttgccgaagaggggacgtttttgttcccgcatgttgccgatacgttgggcgcgttgcaggctaaaggcctgccgctaggcttggtcaccaacaaaccgacgccgttcgtcgcgccgctgctcgaagtcttagatatcgccaaatacttcagcgtggtgattggtggtgatgatgtgcaaaataaaaaaccgcacccggacccgctgctactggtggctgagcggatgggaattgccccacaacagatgctgtttgtcggcgactcacgcaatgatattcaggcggcaaaagcggcaggttgcccatcagttggcttaacctacggatataactacggcgaggctatcgatctcagccagcctgatgtaatttatcagtctataaatgaccttctgcccgcattagggcttccgcatagcgaaaatcaggaatcgaaaaatgactaa

SEQ ID NO: 157581 - protein, 252 aa, Escherichia coli O127:H6 str. E2348/69
MNKFEDIRGVAFDLDGTLVDSAPGLAAAVDMALYALELPVAGEERVITWIGNGADILMERALTWARQERATLRKTMGKPPVDDDIPAEEQVRILRKLFDRYYGEVAEEGTFLFPHVADTLGALQAKGLPLGLVTNKPTPFVAPLLEVLDIAKYFSVVIGGDDVQNKKPHPDPLLLVAERMGIAPQQMLFVGDSRNDIQAAKAAGCPSVGLTYGYNYGEAIDLSQPDVIYQSINDLLPALGLPHSENQESKND

SEQ ID NO: 157582 - DNA, 759 bp, Escherichia coli 55989
  CDS (1)..(759): transl_table=11
atgagtaagtttgaagatattcgcggcgtcgcttttgatctcgacggtacgctggtggacagtgctcccggtcttgctgctgcggtagatatggcgctgtatgcgttggagttacccgtcgcaggtgaagaacgcgttattacctggattggtaacggcgcagatgttctgatggagcgtgcattggcctgggcgcgtcaggaacgtgcgactctgcgtaaaacaatgggtaaaccgcccgttgatgacgacattccggcagaagaacaggtacgtattctgcgtaaactgttcgatcgctactatagcgaggttgccgaagaggggacgtttttgttcccgcacgttgccgatacgttgggcgcgttgcaggctaaaggcctgccgctaggcctggtcaccaacaaaccgacgccgttcgtcgcgccgctgctcgaagccttagatattgccaaatactttagcgtggttatcggcggcgatgatgtgcaaaacaaaaaaccgcatccggacccgctgttactggtggctgagcggatgggaattgccccacaagagatgctgtttgtcggcgactcacgcaatgatattcaggcggcaaaagcggcaggttgcccatcagttggcttaacctacggatataactacggcgaggctatcgatctcagccagcctgatgtaatttatcagtctataaatgaccttctgcccgcattagggcttccgcatagcgaaaatcaggaatcgaaaaatgactaa

SEQ ID NO: 157583 - protein, 252 aa, Escherichia coli 55989
MSKFEDIRGVAFDLDGTLVDSAPGLAAAVDMALYALELPVAGEERVITWIGNGADVLMERALAWARQERATLRKTMGKPPVDDDIPAEEQVRILRKLFDRYYSEVAEEGTFLFPHVADTLGALQAKGLPLGLVTNKPTPFVAPLLEALDIAKYFSVVIGGDDVQNKKPHPDPLLLVAERMGIAPQEMLFVGDSRNDIQAAKAAGCPSVGLTYGYNYGEAIDLSQPDVIYQSINDLLPALGLPHSENQESKND

SEQ ID NO: 157584 - DNA, 726 bp, Diaphorobacter sp. TPSY
  CDS (1)..(726): transl_table=11
atggaacgggtgcaacaagacctcgccgcgctgctcgcgcgcaccgacgccgcgatcgtggacctcgacggcaccatggtggatacgttgggcgattttgccgaggcgctcaatcgcatgctgcgcgacctgcagctccccgccatcgcgcccgcggcgatcgaacgcatggtcggcaaggggtcggagcatctcctgcgttcagtactaaaacacgttctagcgcccgaccagcaagcgctgacagctatgcaattggaagcaaaggccgaggccttgtatccccaggcgtgggagcgctaccagcaccattacctggccatcaacggccagtatgcggcgctgtacgccggcgtggccgaagggcttgcggcgctgcaccgcaccggtcggccgctggtgtgcctgaccaacaagcccaccgacttcgcccggcctctgctgcgcgccaaagggctggacggcttcttcacccacgtgttcggcggcgatgcgttcgcgcgcaagaagcccgacccgctgccactgctcaaggcctgcgaggcggtgggaacctcgccggcgcgcacgctgatgatcggcgactccagcaacgatgcccaggccgcgcgtgcggcgggctgccccgtggtgctggtgacgtacggctacaaccacggccagcccgtgcgcggcgtggacgcggacggctacgtggatgcgctcaccgagctgatcgctagctga

SEQ ID NO: 157585 - protein, 241 aa, Diaphorobacter sp. TPSY
MERVQQDLAALLARTDAAIVDLDGTMVDTLGDFAEALNRMLRDLQLPAIAPAAIERMVGKGSEHLLRSVLKHVLAPDQQALTAMQLEAKAEALYPQAWERYQHHYLAINGQYAALYAGVAEGLAALHRTGRPLVCLTNKPTDFARPLLRAKGLDGFFTHVFGGDAFARKKPDPLPLLKACEAVGTSPARTLMIGDSSNDAQAARAAGCPVVLVTYGYNHGQPVRGVDADGYVDALTELIAS

SEQ ID NO: 157586 - DNA, 705 bp, Pectobacterium atrosepticum SCRI1043
  CDS (1)..(705): transl_table=11
atggctgaattaaccgcgattcgcgggttggcttttgatttggacggtacgttgattcacagcgcaccgggtctggcggcggctatcgatcaggcattagtcgcacagtcgttgcctgcggcgggcgaatcccgtgtcgcaacctggattggtaacggtgcggacgtgatggttgaacgagcgctacgttgggctggcgttgagccaactgccgcacgcgtgcaggaaacccgtgagcggttcgacagctattatgcgcagacggtggatagcggcagcacgctgttcctgcaggtaaaagagacgctggcgcagttggcacagcaaggcgttccgatggcggtggtgactaataaacccacgccgtttgttgcgccgctgctggcaggattagggatcggcgactatttttcgctgatcatcggtggcgatgacgtcattgtgaaaaagcctcatcccgcgccactctatctggtactcggtaaattgggactgcgcgccagcgaacttttgtttgtcggcgattcccgcaatgatattcaggcggcacaggcggcgggttgccgcagtgttggcatgacgtatggttataactatggtgaagcgatcgagctgagtcagccggatgtcgttctggatcgttttgccgatattttgcccctgatcgggcattcttcttcacacaatcaggaacccttagtatga

SEQ ID NO: 157587 - protein, 234 aa, Pectobacterium atrosepticum SCRI1043
MAELTAIRGLAFDLDGTLIHSAPGLAAAIDQALVAQSLPAAGESRVATWIGNGADVMVERALRWAGVEPTAARVQETRERFDSYYAQTVDSGSTLFLQVKETLAQLAQQGVPMAVVTNKPTPFVAPLLAGLGIGDYFSLIIGGDDVIVKKPHPAPLYLVLGKLGLRASELLFVGDSRNDIQAAQAAGCRSVGMTYGYNYGEAIELSQPDVVLDRFADILPLIGHSSSHNQEPLV

SEQ ID NO: 157588 - DNA, 699 bp, Yersinia pseudotuberculosis IP 32953
  CDS (1)..(699): transl_table=11
atggttaagtttaaggcgattcgtggtgttgcattcgatctggatggcacattagtcgacagcgcgcccggtctggcccgtgcaattgatatggcgttggcgcatcaggggttacctgccgctggtgaagcgttagtctccacttggattggtaatggcgcagatgtcttagtcgagcgcgcgttgcattgggcagggcgtgaacataatgctcagcttgtggcacagacccgcgagctgtttgatcactattatgccaaaaccgttgagcaggggagccagttattcccgcaagtgaaagccactttagctcaattggctgccaatggtttgccaataggcctcattaccaataagccaacaccgtttgttgcccctttactaacgtcattggggatcgcggactatttctcagtcatcattgggggcgatgatgtggtggtgaagaaaccgcatccggccccgttgtatttattgctgggaaaacttggcttacatgcccgtgaaatgctgtttgtcggtgactcgcgtaatgacattatggccgcacaggcggcgggttgcccttgtattgggctgacctatggatataactacggtgaagcgattgccaccagtcatccagactgcgtgctggcgcattttgccgacctgttgcccgccattgggctaccatctttaaaagatcaggaagtataa

SEQ ID NO: 157589 - protein, 232 aa, Yersinia pseudotuberculosis IP 32953
MVKFKAIRGVAFDLDGTLVDSAPGLARAIDMALAHQGLPAAGEALVSTWIGNGADVLVERALHWAGREHNAQLVAQTRELFDHYYAKTVEQGSQLFPQVKATLAQLAANGLPIGLITNKPTPFVAPLLTSLGIADYFSVIIGGDDVVVKKPHPAPLYLLLGKLGLHAREMLFVGDSRNDIMAAQAAGCPCIGLTYGYNYGEAIATSHPDCVLAHFADLLPAIGLPSLKDQEV

SEQ ID NO: 157590 - DNA, 675 bp, Mannheimia succiniciproducens MBEL55E
  CDS (1)..(675): transl_table=11
atgaattcacaatttaaattaattggtttcgatttagacggcacattagttaacagtttgccggatttggcattatcggtgaactccgccttagccgaatttgaattgccgcaagcaccggaagaattagtattaacctggattggtaacggtgcggatattttaatcggccgggcgcttgattgggcaaaagagcaatccggcaaaagcctgaccgacgaacaaacggcgcaacttaaagagcgttttagtttctattacgccgaaaatttatgcaatgtaagccgtctttatccaaatgttaaagagactttagaaaccttaaaagaacagggctttattctggcggtggtaaccaataaacccacccgtcatgtgcaacctgttttaaaagcttttgcaattgatcatctttttagcgaaaccttaggcggtcagtctctacccgcaattaaacctcatccggcgccgctatattatttatgcggcaaattcggtttatatcctcatcaaattctttttgtcggcgattcaagaaacgatattttagcggcccacagtgcgggttgtacggctgtcggtttaacttacggttataactataatatgccgattgcagacagccacccggactggatatttgaagacttcgccgatttattaaaaattgtctaa

SEQ ID NO: 157591 - protein, 224 aa, Mannheimia succiniciproducens MBEL55E
MNSQFKLIGFDLDGTLVNSLPDLALSVNSALAEFELPQAPEELVLTWIGNGADILIGRALDWAKEQSGKSLTDEQTAQLKERFSFYYAENLCNVSRLYPNVKETLETLKEQGFILAVVTNKPTRHVQPVLKAFAIDHLFSETLGGQSLPAIKPHPAPLYYLCGKFGLYPHQILFVGDSRNDILAAHSAGCTAVGLTYGYNYNMPIADSHPDWIFEDFADLLKIV

SEQ ID NO: 157592 - DNA, 690 bp, Photobacterium profundum SS9
  CDS (1)..(690): transl_table=11
atgaagcaatttgaaggcattaaatttattgcttttgatcttgatggaacgctgcttgatagcgttcctgatttggcagaagccgctgataaagcgatgcaggcattaggtcgagatagagtgaccgtcgagcaggtaacaacgtggataggtaacggggctgatattctgattggtcgtgcgcttagccaaagcattgagcttgacccagagcttgatcttgcacttcatcaagaagctcgcgcattatttgaccgcttttacgatgaaggtggccataagcaaagccacttatatgctggtgtaaaagagacattggcagcttttcaccaagccaatattccaatggcgattgtgacaaataaaccagctcagtttgtgccacatttacttgagcagcacggtattagtgagtattttgttgatgtgattggtggcgataccttcccattgaaaaagcctgacccatttgccctgcattggttgatggaaaaacatcagttagccgcttgcgaaatgctgatgattggtgattcacgtaatgatattctggcagcacaggcagcaacatgtcatgttgttggtctgacttacggttacaattacggtcaacctatcagtgctagtaacccagatgttgtgttagatcagttcagtcaattaatcgatgtggttaaactagcttgctag

SEQ ID NO: 157593 - protein, 229 aa, Photobacterium profundum SS9
MKQFEGIKFIAFDLDGTLLDSVPDLAEAADKAMQALGRDRVTVEQVTTWIGNGADILIGRALSQSIELDPELDLALHQEARALFDRFYDEGGHKQSHLYAGVKETLAAFHQANIPMAIVTNKPAQFVPHLLEQHGISEYFVDVIGGDTFPLKKPDPFALHWLMEKHQLAACEMLMIGDSRNDILAAQAATCHVVGLTYGYNYGQPISASNPDVVLDQFSQLIDVVKLAC

SEQ ID NO: 157594 - DNA, 759 bp, Salmonella enterica
  subsp. enterica serovar Paratyphi A str. ATCC 9150
  CDS (1)..(759): transl_table=11
atgaataagttgcagaatattcggggcgtcgcctttgatcttgacggtacgctggtggatagcgcgccgggtcttgccgcggcggtggatatggcgctgtatgcgctggaactgccggtcgcgggcgaggagcgcgtgattacctggattggtaacggcgcagacgtattgatggaacgcgcgctgacctgggctcgccaagagcgcgccacgctgcgtaagactatggggaaaccgcccgttgatgaagatattcctgccgaggaacaggtacgcattctgcgtaaactgttcgacaggtattatggcgaagtggcggaagagggcacctttttatttccgcatgtcgccgacacgctgggcgcgctgcacgccagcggattgtcattaggtctggtgacgaataagccgacgccgttcgtcgcgccgttgctggaatcgcttgatatcgccaaatactttagcgtggttatcggcggcgatgatgtgcaaaataagaagccgcatccagagccgttgttgctggtggcaagccgactgggcatgacgccggagcagatgctttttgtcggcgattcgcgtaatgatattcaggccgcaaaagcggcgggctgcccttcggttggcctgacatacggctacaattatggcgaagcgatcgcccttagcgagccggacgtcatttatgacagttttaacgaccttttgcccgcacttgggcttccgcatagcgataaccaggaaataaaaaatgactaa

SEQ ID NO: 157595 - protein, 252 aa, Salmonella enterica
  subsp. enterica serovar Paratyphi A str. ATCC 9150
MNKLQNIRGVAFDLDGTLVDSAPGLAAAVDMALYALELPVAGEERVITWIGNGADVLMERALTWARQERATLRKTMGKPPVDEDIPAEEQVRILRKLFDRYYGEVAEEGTFLFPHVADTLGALHASGLSLGLVTNKPTPFVAPLLESLDIAKYFSVVIGGDDVQNKKPHPEPLLLVASRLGMTPEQMLFVGDSRNDIQAAKAAGCPSVGLTYGYNYGEAIALSEPDVIYDSFNDLLPALGLPHSDNQEIKND

SEQ ID NO: 157596 - DNA, 684 bp, Vibrio fischeri ES114
  CDS (1)..(684): transl_table=11
atgtttgaagatatcaaactgatcgcttttgatttagatgggacgctacttgatagcgttcctgatttagctcgagcggtggatcttgcaatgcaagacatgggataccctcgcgttacattagagcaagcatctcattggattggtaatggtgcagatgtactcgtttctcgcgcgttaagtcaaaactatatcgtgaaagacgatcttgatgctgaattaataaagcaagctcgtgcaagattagatcaacattatcatgatggcggtcatcaacttagccacctctatcctgatgtcaaagacacgttagaacgattgcatcagcaaggttataccttggcgttggtgacgaacaaaccgtctcaatttgtacctgaacttcttgagcagcatcagcttactcacttatttagtgaggtgattggtggtgatacgttcgccgagaagaaaccgaatccttttgcgctaaattggctgcttgataaacatggtttaacggcgcctcaaatgctaatggtcggggattctaaaaatgatattcaagcggctcaagctgccggatgtcatagctttgcactgacttatggctataatcatggcgaacctatctcagatagccaacctgatgtagttagcgatgaatttaagtatttattagccgtgttgagtatggcaagatag

SEQ ID NO: 157597 - protein, 227 aa, Vibrio fischeri ES114
MFEDIKLIAFDLDGTLLDSVPDLARAVDLAMQDMGYPRVTLEQASHWIGNGADVLVSRALSQNYIVKDDLDAELIKQARARLDQHYHDGGHQLSHLYPDVKDTLERLHQQGYTLALVTNKPSQFVPELLEQHQLTHLFSEVIGGDTFAEKKPNPFALNWLLDKHGLTAPQMLMVGDSKNDIQAAQAAGCHSFALTYGYNHGEPISDSQPDVVSDEFKYLLAVLSMAR

SEQ ID NO: 157598 - DNA, 759 bp, Salmonella enterica
  subsp. enterica serovar Choleraesuis str. SC-B67
  CDS (1)..(759): transl_table=11
atggataagttacagaatattcggggcgtcgcctttgatcttgacggcacgctggtggatagcgcgccgggtcttgccgcggcggtggatatggcgctgtatgcgctggaactgccggtcgcgggcgaggagcgcgtgattacctggattggtaacggcgcagacgtattgatggaacgcgcgctgacctgggctcgcgaggagcgcgccacgctgcgtaagacgatggggaaaccgcccgttgatgaagatattcctgccgaggaacaggtacgcattctgcgtaaactgttcgacaggtattatggcgaagtggcggaagaaggcacttttttatttccgcatgtcgccgacacgctgggcgcgctgaacgccagcggattgtcattaggtctggtgacgaataagccgacgccgttcgtcgcgccgttgctggaatcgcttgatatcgccaaatactttagtgtggttatcggcggcgatgatgtgcaaaataagaagccgcatccggagccgctgttgctggtggcaagccggctgggcatgatgccggagcagatgctttttgtcggcgattcgcgtaatgatattcaggctgcaaaagcggcgggctgcccttcggttggcctgacatacggctacaattatggcgaagcgatcgctcttagcgagccggacgtcatttatgacagttttaacgatcttttgcccgcacttgggcttccgcatagcgataaccaggaaataaaaaatgactaa

SEQ ID NO: 157599 - protein, 252 aa, Salmonella enterica
  subsp. enterica serovar Choleraesuis str. SC-B67
MDKLQNIRGVAFDLDGTLVDSAPGLAAAVDMALYALELPVAGEERVITWIGNGADVLMERALTWAREERATLRKTMGKPPVDEDIPAEEQVRILRKLFDRYYGEVAEEGTFLFPHVADTLGALNASGLSLGLVTNKPTPFVAPLLESLDIAKYFSVVIGGDDVQNKKPHPEPLLLVASRLGMMPEQMLFVGDSRNDIQAAKAAGCPSVGLTYGYNYGEAIALSEPDVIYDSFNDLLPALGLPHSDNQEIKND

SEQ ID NO: 157600 - DNA, 675 bp, Haemophilus influenzae 86-028NP
  CDS (1)..(675): transl_table=11
atgaacacacaatttaaacttattggctttgatttagacggcaccttggtaaatagcttgcctgatttagcgttatccgtaaattctgccttggctgaatttaatttaccgaaagcgccagaagaattagttttaacttggatcggtaatggcgcgcctgtattaattgctcgagcgttagattgggcgaaaaaacaaacaggaaaagtgctaactgaaacagaggttaagcaagtaacagaacgttttaatttttattatggcgagaatttatgtaatgtcagccgcttgtatccaaatgtaaaagaaactttagaaaccttgaaagaaaaaggctatgtcctagcagttgttaccaataaacccacaagacatgttcaacctgtgttggcagcatttggcattgatcatttatttagtgaaatgttgggcggtcaatccttacctgccattaagccacatccagctccactttattatttatgcggaaaatttggttttgaaccacgccaagtgcttttcgtgggcgattctaaaaatgatattatcgcggctcacgctgcgggctgtgcagttgttggtttaacttacggctacaattacaatatccctatcactgaatccaatccagattgggtgtttgatgattttgcccagctattaacgattctttaa

SEQ ID NO: 157601 - protein, 224 aa, Haemophilus influenzae 86-028NP
MNTQFKLIGFDLDGTLVNSLPDLALSVNSALAEFNLPKAPEELVLTWIGNGAPVLIARALDWAKKQTGKVLTETEVKQVTERFNFYYGENLCNVSRLYPNVKETLETLKEKGYVLAVVTNKPTRHVQPVLAAFGIDHLFSEMLGGQSLPAIKPHPAPLYYLCGKFGFEPRQVLFVGDSKNDIIAAHAAGCAVVGLTYGYNYNIPITESNPDWVFDDFAQLLTIL

SEQ ID NO: 157602 - DNA, 819 bp, Pseudomonas fluorescens Pf-5
  CDS (1)..(819): transl_table=11
atgagcgcctttgagcagctgttccaggggcgcctgccacggctggtgatgttcgacctggatggcaccctggtcgattcggtaccggaccttgcggccgccgtggatcagatgctgctcaagctggggcgcaagcctgccggtgtcgaggcggtgcgtgagtgggttggcaacggtgcgcccatgctggtgcgccgggccctggccaacagcctggaggcccagggtgtcgacgatgtcgaggccgagtatgcgctggagctgttcaataccgcctacgaggacagccacgagttgaccgtggtctatcccggagcgcgcgagactctcaagtggctgcacaagcagggcgtggaaatggccctgattaccaacaagcccgagcgtttcgtggcccccttgctggaccagatgaaaatcggtcggtatttccgctggatcatcggcggcgataccctgccgcagaagaaacccgacccggcggcgctgttctttgtgatgaagatggccagcgtgccggcctcgcaatcactgttcgtcggcgattcgcgcagtgacgtgctggcagccaaggcggcgggggtcaagtgcgtcgccctgagctacggctacaaccacggccggccgattgccgaggagtcgccggcgctggtgatcgacaacctgcgggcgctgatccccggttgcttagaacctgccgctgagataacgttgcccgacgctgttccatcccattctggaaactccatcgtggtggtcactcgcaaactctggatgaaagtcatcaaggccctggcccgctggcgttggcgcgcctga

SEQ ID NO: 157603 - protein, 272 aa, Pseudomonas fluorescens Pf-5
MSAFEQLFQGRLPRLVMFDLDGTLVDSVPDLAAAVDQMLLKLGRKPAGVEAVREWVGNGAPMLVRRALANSLEAQGVDDVEAEYALELFNTAYEDSHELTVVYPGARETLKWLHKQGVEMALITNKPERFVAPLLDQMKIGRYFRWIIGGDTLPQKKPDPAALFFVMKMASVPASQSLFVGDSRSDVLAAKAAGVKCVALSYGYNHGRPIAEESPALVIDNLRALIPGCLEPAAEITLPDAVPSHSGNSIVVVTRKLWMKVIKALARWRWRA

SEQ ID NO: 157604 - DNA, 681 bp, Colwellia psychrerythraea 34H
  CDS (1)..(681): transl_table=11
atgaaactgcaagaaaaagaagtactcttattcgatctcgatggcaccttagtagacagtgcccctgatcttgctttagccgtaaatagaacccttaaagatttaaacaaagcgaccttcgatcaagacactattcaccattgggtgggtaatggtgccaaagtattaattgaacgagcattatcgggttctgcaatcattgataaagaattagatgaaacgctcactaaagatgcgctaaccatttttctagcccattaccagcagtgcttatgcatagaatcagtattgtatgacgatgtgcaagaagggttgctttcattaaaagcggctggctttcgtcttgcgattattaccaataaacctgctattttcattcaaccgatattaacgggcttaggtattgataacctgtttgagttattaattggtggtgatacgttagcggataaaaaaccacatccagcaccattacattatgccatgaagcaacttaacgttgttgctgagcagtgtgtgatgatcggagattctaaaaacgatatcttagctgcaaaagcagccaacatagatagtgttggcttaacttacggttataactacggtgaagacatcaatcaatatggcccgcagtggtgctttgatactttcaatgaactactgatttcgttaaagcgttaa

SEQ ID NO: 157605 - protein, 226 aa, Colwellia psychrerythraea 34H
MKLQEKEVLLFDLDGTLVDSAPDLALAVNRTLKDLNKATFDQDTIHHWVGNGAKVLIERALSGSAIIDKELDETLTKDALTIFLAHYQQCLCIESVLYDDVQEGLLSLKAAGFRLAIITNKPAIFIQPILTGLGIDNLFELLIGGDTLADKKPHPAPLHYAMKQLNVVAEQCVMIGDSKNDILAAKAANIDSVGLTYGYNYGEDINQYGPQWCFDTFNELLISLKR

SEQ ID NO: 157606 - DNA, 666 bp, Ralstonia eutropha JMP134
  CDS (1)..(666): transl_table=11
atgatgactggaatcgacgccgtgtttttcgatctcgacgggacgctcgccgacaccgctccggatcttgccgcagctgccaaccggctggtcgtcgagcatggtggctcgcctgttgcctatgaaaagctgcgccccgtggcgtcgcatggcgcgcgcggcctgctgggcgctgcattcggcaagcacccggacgatccggacttccctgcgctgcgcgacctgtttctcgactactacgaagccgatatcgccgtgcatactcggctgttcgacggcatgccgcaggtactcgatgcgctggaaggtgcaggcatccgctggggcattgtgaccaacaagatcgccagattcaccgtgccgctcgtgaccgcgatcgggctggcgccgcgcgcgtcagccgtggtcagcggggatacgacgccccatgccaagccacatccggctccgctgctccgtgccgcagaactcagtggcgtatcgcctaagcgttgcgtgtatgtgggcgatgacttgcgcgatatccaggcgggcaaggcagcgggcatgctcacggtcacggccgcgtacgggtactgcggcgaaggcgaaccgccggagacctggggcgccgactacctcgtgcgccaccctgccgagttgattccgctgctcatgccggactga

SEQ ID NO: 157607 - protein, 221 aa, Ralstonia eutropha JMP134
MMTGIDAVFFDLDGTLADTAPDLAAAANRLVVEHGGSPVAYEKLRPVASHGARGLLGAAFGKHPDDPDFPALRDLFLDYYEADIAVHTRLFDGMPQVLDALEGAGIRWGIVTNKIARFTVPLVTAIGLAPRASAVVSGDTTPHAKPHPAPLLRAAELSGVSPKRCVYVGDDLRDIQAGKAAGMLTVTAAYGYCGEGEPPETWGADYLVRHPAELIPLLMPD

SEQ ID NO: 157608 - DNA, 759 bp, Shigella sonnei Ss046
  CDS (1)..(759): transl_table=11
atgaataagtttgaagatattcgcggcgtcgcttttgatcttgatggtacgctggtcgacagtgctcccggtcttgctgctgcggtagatatggcgctgtatgcgctggagttgcccatcgcaggtgaagaacgcgttattacctggattggtaacggcgcagatgttctgatggagcgcgcattgacctgggcgcgtcaggaacgtgcgactcagcgtaaaacaatgggtaaaccgcccgttgatgacgacattccggcagaagaacaggtacgtattctgcgtaaactgttcgatcgctactatggcgaggttgccgaagaggggacgtttttgttcccgcacgttgccgatacgttgggcgcgttgcaggctaaaggcctgccgctaggcctggtcaccaacaaaccgacgccgttcgtcgcaccgctgctcgaagccttagatattgccaaatactttagcgtggttatcggcggcgatgatgtgcaaaacaaaaaaccgcatccggacccgctgttactggtggctgagcggatgggaattgccccacaacagatgctgtttgtcggcgactcacgcaatgatattcaggcggcaaaagcggcaggttgcccatcagttggcttaacctacggatataactacggcgaggctatcgatctcagccagcctgatgtaatttatcagtctataaatgaccttctgcccgcattagggcttccgcatagcgaaaatcaggaatcgaaaaatgactaa

SEQ ID NO: 157609 - protein, 252 aa, Shigella sonnei Ss046
MNKFEDIRGVAFDLDGTLVDSAPGLAAAVDMALYALELPIAGEERVITWIGNGADVLMERALTWARQERATQRKTMGKPPVDDDIPAEEQVRILRKLFDRYYGEVAEEGTFLFPHVADTLGALQAKGLPLGLVTNKPTPFVAPLLEALDIAKYFSVVIGGDDVQNKKPHPDPLLLVAERMGIAPQQMLFVGDSRNDIQAAKAAGCPSVGLTYGYNYGEAIDLSQPDVIYQSINDLLPALGLPHSENQESKND

SEQ ID NO: 157610 - DNA, 684 bp, Thiobacillus denitrificans ATCC 25259
  CDS (1)..(684): transl_table=11
atgaaaagcttcccccttcccatcaaggccgtcgtcatcgacctcgacggcaccctgctcaatacggcgcccgatctcgcgcatgccgccgaactcatgatggcagagctcgggcggccctgcccgtcgctcgagaccatttcgacctatatcggcaacggcgtctcgcgtctggtcaagcgggtgctcaccggcgagatggacgccgagccggatccggcgttgttcgcgcaggcgatcgcgtcctaccagaagcattacggcgagcacgtgtcgctgcactcgcgccccttcgacggcgtggtcgagggcctacaggccttcaaggcgatggggttgcacatggcgtgcatcaccaacaaggccgagcagttcaccgtcccgctcctcaagggcacggggctgtacgactacttcgagctgatcctctccggcgatacgctgcccaagcgcaagcccgacccactgccgctgttgcatgcgtgcgaggtgttcggcgtagccccagccgagctgttgctgatcggcgattcgctcaacgacacgcaggccgcgcgcgccgcaggctgcccggtattctgcgtgccctacggctacaaccgcgggcgcccggtcaccgaactcgatctcgacgcagtcgtgccgagtctcgccgaggcggcgctgatggtgacgaaggcgtga

SEQ ID NO: 157611 - protein, 227 aa, Thiobacillus denitrificans ATCC 25259
MKSFPLPIKAVVIDLDGTLLNTAPDLAHAAELMMAELGRPCPSLETISTYIGNGVSRLVKRVLTGEMDAEPDPALFAQAIASYQKHYGEHVSLHSRPFDGVVEGLQAFKAMGLHMACITNKAEQFTVPLLKGTGLYDYFELILSGDTLPKRKPDPLPLLHACEVFGVAPAELLLIGDSLNDTQAARAAGCPVFCVPYGYNRGRPVTELDLDAVVPSLAEAALMVTKA

SEQ ID NO: 157612 - DNA, 684 bp, Thiomicrospira crunogena XCL-2
  CDS (1)..(684): transl_table=11
atgtcccaagaaaaaataaaaccgggattcatcttaattgatttggatggaaccttgattgacagcgtgccagatttggcgtattgcgttgatgaaatgatgaaacagcttggtatgcctgttcgtggtgaagccgcggtacgtaactgggttggaaatggcgttcagcgtcttgttgaaagagcgttgattaactctgtcgatggcatgccggatcaagacttgatggataaggcctatcctatttatcttgagctttataaagaaaatacttctaagcgcagctgtgtgtatgaaggggttgttgaaggaattgaatggatgaaagcacaaggctatcgtgtggcatgtgtcaccaacaaagccgcagcctttaccattccgcttttgaaagataaagggctttacgattcttttgaagtgattgtttctggtgatacttgtgaagagaaaaagccgcatccaatgccattactttatgcggcagaacagttgggcgtaacaccggaaaatgctttgatgatcggtgattcgaaatccgatgtgaaagcagcccgtgctgctggctttcatattttctgcatgacttatgggtataatcatggtgaagatattcgaaactatgagcctgatgcggttatgggttcctttatggaattgccaaattacttagcggctaaataa

SEQ ID NO: 157613 - protein, 227 aa, Thiomicrospira crunogena XCL-2
MSQEKIKPGFILIDLDGTLIDSVPDLAYCVDEMMKQLGMPVRGEAAVRNWVGNGVQRLVERALINSVDGMPDQDLMDKAYPIYLELYKENTSKRSCVYEGVVEGIEWMKAQGYRVACVTNKAAAFTIPLLKDKGLYDSFEVIVSGDTCEEKKPHPMPLLYAAEQLGVTPENALMIGDSKSDVKAARAAGFHIFCMTYGYNHGEDIRNYEPDAVMGSFMELPNYLAAK

SEQ ID NO: 157614 - DNA, 759 bp, Shigella dysenteriae Sd197
  CDS (1)..(759): transl_table=11
atgaataagtttgaagatattcgcggcgtcgcttttgatcttgatggtacgctggtcgacagtgctcttggtcttgctgctgcggtagatatggcgctgtatgcgctgaagttgcccatcgcaggtgaagaacgcgttattacctggattggtaacggcgcagatgttctgatggagcgcgcattgacttgggcgcgtcaggaacgtgcgactctgcgtaaaacaatgggtaaaccgcccgttgatgacgacattccggcagaagaacaggtacgtattctgcgtaaactgttcgatcgttactatggcgaggttgccgaagaggggacgtttttgttcccgcacgttgccgatacgttgggcgcgttgcaggctaaaggcctgccgctaggcctggtcaccaacaaaccgacgccgttcgtcgcgccgctgctcgaagccttagatatcgccaaatacttcagcgtggtgattggtggtgatgatgtgcaaaacaaaaaaccgcatccggacccgctgttactggtggctgagcggatgggaattgctccacaacagatgctgtttgttggcgactcacgcaatgatattcaggcagcaaaagcggcaggttgcccatcagttggcttaacctacggatataactacggcgaggctatcgatctcagccagcctgatgtaatttatcagtctataaatgaccttctgcccgcattagggcttccgcatagcgaaaatcaggaatcgaaaaatgactaa

SEQ ID NO: 157615 - protein, 252 aa, Shigella dysenteriae Sd197
MNKFEDIRGVAFDLDGTLVDSALGLAAAVDMALYALKLPIAGEERVITWIGNGADVLMERALTWARQERATLRKTMGKPPVDDDIPAEEQVRILRKLFDRYYGEVAEEGTFLFPHVADTLGALQAKGLPLGLVTNKPTPFVAPLLEALDIAKYFSVVIGGDDVQNKKPHPDPLLLVAERMGIAPQQMLFVGDSRNDIQAAKAAGCPSVGLTYGYNYGEAIDLSQPDVIYQSINDLLPALGLPHSENQESKND

SEQ ID NO: 157616 - DNA, 759 bp, Shigella boydii Sb227
  CDS (1)..(759): transl_table=11
atgaataagtttgaagatattcgcggcgtcgcttttgatctcgacggtacgctggttgacagtgctcccggtcttgctgctgcggtagatatggcgctgtatgcgctggagttacccgtcgcaggtgaagaacgcgttattacctggattggtaacggcgcagatgttctgatggagcgtgcattggcctgggcgcgtcaggaacgtgcgactctgcgtaaaacaatgggtaaaccgcccgttgatgacgacattccggcagaagaacaggtacgtattctgcgtaaactgttcgatcgctactatagcgaggttgccgaagaggggacgtttttgttcccgcacgttgccgatacgttgggcgcgttgcaggctaaaggcctgccgctaggcctggtcaccaacaaaccgacgccgttcgtcgcgccactgctcgaagccttagatattgccaaatactttagcgtggttatcggcggcgatgatgtgcaaaacaaaaaaccgcatccggacccgctgttactggtggctgagcggatgggaattgccccacaacagatgctgtttgtcggcgactcacgcaatgatattcaggcggcaaaagcggcaggttgcccatcagttggcttaacctacggatataactacggcgaggctatcgatctcagccagcctgatgtaatttatcagtctataaatgaccttctgcccgcattagggcttccgcatagcgaaaatcaggaatcgaaaaatgactaa

SEQ ID NO: 157617 - protein, 252 aa, Shigella boydii Sb227
MNKFEDIRGVAFDLDGTLVDSAPGLAAAVDMALYALELPVAGEERVITWIGNGADVLMERALAWARQERATLRKTMGKPPVDDDIPAEEQVRILRKLFDRYYSEVAEEGTFLFPHVADTLGALQAKGLPLGLVTNKPTPFVAPLLEALDIAKYFSVVIGGDDVQNKKPHPDPLLLVAERMGIAPQQMLFVGDSRNDIQAAKAAGCPSVGLTYGYNYGEAIDLSQPDVIYQSINDLLPALGLPHSENQESKND

SEQ ID NO: 157618 - DNA, 684 bp, Nitrosospira multiformis ATCC 25196
  CDS (1)..(684): transl_table=11
atgcattttcccctgccgatcaaagcagtcatgatcgatctcgacggcaccttgctggataccgcgcctgatcttgccaccgctgccaacatgatgctgaaggaactgggaaaagccgagcttccgctggaaacaatccaatcctacatcggcaaagggatagaaaagctggtgaaacgttcgctcacgggcgacctcgatggcgagcccgactcagacctattgcggcgcgcaatgccgctgtatgagcgcagctacgaaaaaacattgtatgtcgatacgcgcgcttaccctggcgtgcgcgagggattgaacgctttgcgtgcaggcggcttccggctcgcctgcgtgacgaacaaggcagaggcttttaccttgccgctgcttcgtgcggcggaactgctggactacttcgatatcgtggtttccggggatagcttgccgaaaaagaagccggatccgatgcctttgctgcacgcttgtgaacgtttcgaaatccagccgcatgacatgctgctggtcggggattcgctaaatgatgcccaggctgcgcgcgcggcgggttctcacgtattttgtgttccctatggatacaatgaaggacgcgacgtgtacgaacttgattgcgacgcgatcgtcccatcgttatatgaggcaacaaagctgatccagaaatcctcatga

SEQ ID NO: 157619 - protein, 227 aa, Nitrosospira multiformis ATCC 25196
MHFPLPIKAVMIDLDGTLLDTAPDLATAANMMLKELGKAELPLETIQSYIGKGIEKLVKRSLTGDLDGEPDSDLLRRAMPLYERSYEKTLYVDTRAYPGVREGLNALRAGGFRLACVTNKAEAFTLPLLRAAELLDYFDIVVSGDSLPKKKPDPMPLLHACERFEIQPHDMLLVGDSLNDAQAARAAGSHVFCVPYGYNEGRDVYELDCDAIVPSLYEATKLIQKSS

SEQ ID NO: 157620 - DNA, 696 bp, Hahella chejuensis KCTC 2396
  CDS (1)..(696): transl_table=11
atgccagaccttttgatccccagttatgaaaacggcctgccacaattggcgttattcgatctggacggcacgctgattgactcagcgcctgatttggcggatgcggtagatttcatgttgctggaatccggtttcagcgcagcgggagaagcgttagtgcgggaatgggtgggcaatggtgcgccgatgctgatcaaacgggcattggcgcacgcattggagctggaagagccacaacaggttgcagaggcgcaattccagagtgcggcgtcgatcttctatgatcgctatgacgaatactgctgcgtgcgcacccgcatttatcctggcgcggaagagttgttgcaacattggcgcgatcaaggcgttgcgatggggattgtcaccaacaagcccgcccgcttcactcaaccgatactgcaggccctcaaactggagcagtacttcgccatcagtttgtccggcgactccctgcccgtcaaaaagccagacccaaccccactcttgcatgcatgcgaagccttacaggcgcagccaggctctacgttgatgattggcgactccatcaatgatgtactggccgcccgtcacgcgaatatgaaaatcgcctgcgtcacttacggctacaaccacggcgaagacatccgcgacgccaatccggattgggtcatggactcgctcattgagttgaagtaa

SEQ ID NO: 157621 - protein, 231 aa, Hahella chejuensis KCTC 2396
MPDLLIPSYENGLPQLALFDLDGTLIDSAPDLADAVDFMLLESGFSAAGEALVREWVGNGAPMLIKRALAHALELEEPQQVAEAQFQSAASIFYDRYDEYCCVRTRIYPGAEELLQHWRDQGVAMGIVTNKPARFTQPILQALKLEQYFAISLSGDSLPVKKPDPTPLLHACEALQAQPGSTLMIGDSINDVLAARHANMKIACVTYGYNHGEDIRDANPDWVMDSLIELK

SEQ ID NO: 157622 - DNA, 789 bp, Rhodoferax ferrireducens T118
  CDS (1)..(789): transl_table=11
ttgcgcgttgtgagcttgctctgtcctcaaccaattaaaaccttgaactctattgacttgaaccagtttgacgtcagtgccgtcatcgttgaccttgatggcaccatgattgacacattggacgatttttgtgttgcgctcaaccggatgctgggcgacttgcctgcgccttttgcctcccatcaggtcgaccgcgcaacggttgcgcagctggtcggcaaaggctcagagcatttgctgaaaagcgtgctgaccctcgtcagcaatgcttcattagctattgattcagaagcatatgacggatcgactgcaggcaacgaggccgacttgccggaccgtctctacccgcaggcctgggccagttaccagcgccattaccgcgcggttaatggccaatacgcccgtgtttttcccggtgttgaggcggggctggtctacctgaaagcccgcggcctgaagctggcctgcctgaccaacaaaccgacggcgttcgcccgcgcgctgctgcaggccaagggcctggacggtttctttgatctcacgtttggcggcgacgcctttgcgcgtaaaaagcccgatccgctgccgctgctcgccacctgtgccgcgttgggctcagtgccgcggcgcaccttgatgattggcgactccagcaacgacgcccaggcggcgcgtgccgctggctgcccggtgctgctggtgacctacggctacaaccatggtcagccgattcgcgacgtgcaggccgatggctacatcgactccttgcagcgcttgatacctgcctag

SEQ ID NO: 157623 - protein, 262 aa, Rhodoferax ferrireducens T118
MRVVSLLCPQPIKTLNSIDLNQFDVSAVIVDLDGTMIDTLDDFCVALNRMLGDLPAPFASHQVDRATVAQLVGKGSEHLLKSVLTLVSNASLAIDSEAYDGSTAGNEADLPDRLYPQAWASYQRHYRAVNGQYARVFPGVEAGLVYLKARGLKLACLTNKPTAFARALLQAKGLDGFFDLTFGGDAFARKKPDPLPLLATCAALGSVPRRTLMIGDSSNDAQAARAAGCPVLLVTYGYNHGQPIRDVQADGYIDSLQRLIPA

SEQ ID NO: 157624 - DNA, 672 bp, Chromohalobacter salexigens DSM 3043
  CDS (1)..(672): transl_table=11
atgtcgcccaatccgcccctgcgcattctcgacggtatccgcctggtcgcgttcgacctcgatggcacgctggtggattcggtccccgacctggccgctgccgtcgatgccgccctgcgttcgctgggactcgcgggcgtcgacgaagcgtcggtgcgcgactgggtgggcaatggctcccgcaagctggtggagcgcgccctggaagcgctcgacgcgcaagacacggacccggaggcggctcacgaggcgtttctgcatcattatcgcctggcgccttgtcgcgcgacgcgcctgtaccccggtgtgcgcgaggcgctcgaagggttgcgcgcacgcggtctgacgctggtgctgatcaccaacaagccggcggcgttcatcgccccgatcctcgaaacgctgggactgagcgactttttcgacctgacgctgggcggcgattcgctggcggcgaagaagccagatccggcgcccttgctgcacgtggcatcccgtttcggggtgacgccgagcgtctgtctgatggtgggggactcccggcatgacatcgaggccgggcggggtgccggattccgcaccctggcggtgccctacggctacaatcacggcgatccggtggcggcgagcgcgccggatgccatggttgaatcgctgggggaactcgtttag

SEQ ID NO: 157625 - protein, 223 aa, Chromohalobacter salexigens DSM 3043
MSPNPPLRILDGIRLVAFDLDGTLVDSVPDLAAAVDAALRSLGLAGVDEASVRDWVGNGSRKLVERALEALDAQDTDPEAAHEAFLHHYRLAPCRATRLYPGVREALEGLRARGLTLVLITNKPAAFIAPILETLGLSDFFDLTLGGDSLAAKKPDPAPLLHVASRFGVTPSVCLMVGDSRHDIEAGRGAGFRTLAVPYGYNHGDPVAASAPDAMVESLGELV

SEQ ID NO: 157626 - DNA, 678 bp, Psychrobacter cryohalolentis K5
  CDS (1)..(678): transl_table=11
atggataagcaacttttaatttttgattttgatggtacccttattgatagcgtgccagatttggcggatgcgaccaatgcgatgctgactacccttggcaaaacgccctatcctctcaatagcattcgtaactgggtcggtaatggctcaagaatgcttgttgagcgcgccttggttggtaagatagaggttttagagggtgaattagccaaagaagccgtcgaccatgctgagcaagtatttttcgatgcttataaaaatatcagtggcagcaaaactgtcgcttaccccgatgttgatagtgggctcagaaagctacaagcagcaggatatgagctggcattggtcaccaataagccgattcgttttgtaccaaaaatactgcaagcctttggctggcaagacatctttagcgaagtgcttggcggtgatagcttgtctagcaaaaaaccagaccccgcgccgttattacatgtctgtgagacgttgaatgttactccaaaacaagcggtcatgattggtgattcaagaaatgatatcttagcgggacaaaatgccaatatggacacgctcgcattgtcttatggttataactatgggcaagatattcgtgagcttaatcctacggcagccttcgatgattttagcgctttggtggactatttattaaagagttag

SEQ ID NO: 157627 - protein, 225 aa, Psychrobacter cryohalolentis K5
MDKQLLIFDFDGTLIDSVPDLADATNAMLTTLGKTPYPLNSIRNWVGNGSRMLVERALVGKIEVLEGELAKEAVDHAEQVFFDAYKNISGSKTVAYPDVDSGLRKLQAAGYELALVTNKPIRFVPKILQAFGWQDIFSEVLGGDSLSSKKPDPAPLLHVCETLNVTPKQAVMIGDSRNDILAGQNANMDTLALSYGYNYGQDIRELNPTAAFDDFSALVDYLLKS

SEQ ID NO: 157628 - DNA, 819 bp, Pseudomonas entomophila L48
  CDS (1)..(819): transl_table=11
atgagcggcttcgagcagctgttcccggggacgctgcccaggctggtgatgttcgatctggatggtaccctgatcgactcggtccccgacctggccgcagccgtcgaccgcatgctgctcgaactcgggcgcccgcctgccgggctcgatgccgtgcgccactgggtgggcaacggtgcccaggtgctggtgcgccgggcgctggccggcaacatcgaacacgacaccgtggacgacgaactggccgaccgtgccctggccctgttcatggaggcctacgccgagagccatgagctgaccgtcgtctaccctggtgtgcgcgacaccctgcgttggctgagcaagcagggcgtggaaatggccctgatcaccaacaagccggagcgtttcgtcgcgcctttgcttgaccagatgaagatcggccgttatttccgctggatcattggtggcgacaccctgccacagaagaagcccgaccctgcggccttgctgtttgtcatgaagatggccggcgttgccccggagcagtcgctgttcatcggcgattcgcgcagtgacgtgttggcagccaaggcagccggggtcaagtgtgttggccttagctatggttacaaccacggccgccccatcgacgatgaatcccccagcctggtgatcgacgacctgcgccgcctgctgcccggttgcgtagtcaccgacactgggataacgttggcggaccttcaagccccgcaaagcagagacaacaacgtggtggtcactggcaaattctggatgaaagtcatcaaggccctggcccgctggcgctggcgcgcctga

SEQ ID NO: 157629 - protein, 272 aa, Pseudomonas entomophila L48
MSGFEQLFPGTLPRLVMFDLDGTLIDSVPDLAAAVDRMLLELGRPPAGLDAVRHWVGNGAQVLVRRALAGNIEHDTVDDELADRALALFMEAYAESHELTVVYPGVRDTLRWLSKQGVEMALITNKPERFVAPLLDQMKIGRYFRWIIGGDTLPQKKPDPAALLFVMKMAGVAPEQSLFIGDSRSDVLAAKAAGVKCVGLSYGYNHGRPIDDESPSLVIDDLRRLLPGCVVTDTGITLADLQAPQSRDNNVVVTGKFWMKVIKALARWRWRA

SEQ ID NO: 157630 - DNA, 759 bp, Escherichia coli 536
  CDS (1)..(759): transl_table=11
atgaataagtttgaagatattcgcggcgtcgcttttgatctcgacggtacgctggttgacagtgcacccggtcttgctgctgcggtagatatggcgctgtatgcgctggagttgcctgtcgcaggtgaagaacgcgttattacctggattggtaacggcgcagatattctgatggagcgcgcattgacctgggcgcgtcaggaacgtgcgactctgcgtaaaacaatgggtaaaccgcccgttgatgacgacattccggcagaagaacaggtacgtatcctgcgtaaactgttcgatcgctactatggcgaggttgccgaagaggggacgtttttgttcccgcacgttgccgatacgttgggcgcgttgcaggctaaaggcctgccgctaggcctggtcaccaacaaaccgacgccgttcgtcgcgccgctgctcgaagccttagatatcgccaaatacttcagcgtggtgattggtggtgatgatgtgcaaaataaaaaaccgcacccggacccgctgctactggtggctgagcggatgggaattgctccacaacagatgttgtttgttggcgactcacgcaatgatattcaggcagcaaaagcggcaggttgcccatcagttggcttaacctacggatataactacggcgaggctatcgatctcagccagcctgatgtaatttatcagtctataaatgaccttctgcccgcattagggcttccgcatagcgaaaatcaggaatcgaaaaatgactaa

SEQ ID NO: 157631 - protein, 252 aa, Escherichia coli 536
MNKFEDIRGVAFDLDGTLVDSAPGLAAAVDMALYALELPVAGEERVITWIGNGADILMERALTWARQERATLRKTMGKPPVDDDIPAEEQVRILRKLFDRYYGEVAEEGTFLFPHVADTLGALQAKGLPLGLVTNKPTPFVAPLLEALDIAKYFSVVIGGDDVQNKKPHPDPLLLVAERMGIAPQQMLFVGDSRNDIQAAKAAGCPSVGLTYGYNYGEAIDLSQPDVIYQSINDLLPALGLPHSENQESKND

SEQ ID NO: 157632 - DNA, 759 bp, Shigella flexneri 5 str. 8401
  CDS (1)..(759): transl_table=11
atgaataagtttgaagatattcgcggcgtcgcttttgatcttgatggtacgctggtcgacagtgcgcctggtcttgctgctgcggtagatatggcgctgtatgcgctggagttgcccgtcgcaggtgaagaacgcgttattacctggattggtaacggcgcagatgttctgatggagcgcgcattgacctgggcgcgtcaggaacgtgcgactctgcgtaaaacaatggggaaaccgcccgttgatgacgacattccggcagaagaacaggtacgtattctgcgtacactgttcgatcgctactatggcgaggttgccgaagaggggacgtttttgttcccgcacgttgccgatacgttgggcgcgttgcaggctaaaggcctgccgctaggcttggtcaccaacaaaccgacgccgttcgtcgcgccgctgctcgaagccttagatattgccaaatactttagcgtggttatcggcggcgatgatgtgcaaaacaaaaaaccgcatccggacccgctgttactggtggctgagcggatgggaattgccccacaacagatgctgtttgtcggcgactcacgcaatgatattcaggcggcaaaagcggcaggttgcccatcagttggcttaacctacggatacaactacggcgaggctatcgatctcagccagcctgatgtaatttatcagtctataaatgaccttctgcccgcattagggcttccgcatagcgaaaatcaggaatcgaaaaatgactaa

SEQ ID NO: 157633 - protein, 252 aa, Shigella flexneri 5 str. 8401
MNKFEDIRGVAFDLDGTLVDSAPGLAAAVDMALYALELPVAGEERVITWIGNGADVLMERALTWARQERATLRKTMGKPPVDDDIPAEEQVRILRTLFDRYYGEVAEEGTFLFPHVADTLGALQAKGLPLGLVTNKPTPFVAPLLEALDIAKYFSVVIGGDDVQNKKPHPDPLLLVAERMGIAPQQMLFVGDSRNDIQAAKAAGCPSVGLTYGYNYGEAIDLSQPDVIYQSINDLLPALGLPHSENQESKND

SEQ ID NO: 157634 - DNA, 744 bp, Ralstonia eutropha H16
  CDS (1)..(744): transl_table=11
atgaccgagggcgtgttcctgcgccgcaacgactggcgcggcatcgaaggcgtgatcgtcgacctcgacggcaccatggtcgacaccgcgggcgacttccacgcctcgatcaacgccatgctgctggcgctgggccgccagcaccccaacctggggccggcagcgccgatgtcggaggcggagatcgtcagctatgtaggcaagggctcggaaaacctgatccggcgcgtgctggacgcgcgcttctcgccgctgcacgccaacagcctgttcgccgacgcctatgcgctgtacgaccgcgagtacatccgcatcaacggccagttctcgcaggtctaccccggcgtgcgcgaaggcctggcggcgatgaaggcggccgggctgcgcctggcctgcgtgaccaacaagccctacagcttcaccgagccgctgctggccaagaccggcctcgcccagtacttcgagctggtctacggtggcgacgccttcccgctgcgcaagcccgaccccttcccgctgctgaaagtggccgacgccttcgggctggagccgtcggcaatggcggcgctgggcgactcggaaaacgacgcgcaggcggcccgcgcggccggcatgggcgtgctgctggtgccctatggctacaaccatggcaaccctgtacaagccgttgacgccgatggtatagtcgactccattgcccacgccgcagcgctgtttgcagcacactgggcaggtcatcgatag

SEQ ID NO: 157635 - protein, 247 aa, Ralstonia eutropha H16
MTEGVFLRRNDWRGIEGVIVDLDGTMVDTAGDFHASINAMLLALGRQHPNLGPAAPMSEAEIVSYVGKGSENLIRRVLDARFSPLHANSLFADAYALYDREYIRINGQFSQVYPGVREGLAAMKAAGLRLACVTNKPYSFTEPLLAKTGLAQYFELVYGGDAFPLRKPDPFPLLKVADAFGLEPSAMAALGDSENDAQAARAAGMGVLLVPYGYNHGNPVQAVDADGIVDSIAHAAALFAAHWAGHR

SEQ ID NO: 157636 - DNA, 690 bp, Alkalilimnicola ehrlichei MLHE-1
  CDS (1)..(690): transl_table=11
atgaaggctgacctgagcaggattcgcgcggtgctctacgatctggacggcaccctggtcgatagcgcaccggacctggcggtggcggttaaccgcgtgctggccgacctgggccagcagccccgggaagagaacgagattcgccgctgggtgggcaacggggcccggcgcctgattatgcgggccctgaccggcgagcatgagggcgatcccggtgatgagcacacggatccggcactggagcagttcttcgagtactacggtgagcgggtggccgagcgcagtcgcctctaccccggcgtggccgagggcatcgccggggtggccgagctgggtatcgcccaggcggtggtgaccaacaagccgcgccggtttgccgagccgctgttggagaccctgggcatccgccgctatatggcgacggtggtgggcggcgagtgcgccccggtgaaaaagcccgatccggccccgctgcgtctggccctggagcggctgggggtggagcccgcacaggcgttgatggtgggcgactcggcggtggacgtgggcgcggcccgcaacaccggcatgaaggtgatctgcgtgccctacggttataacgccggcaatgccatcgaggacgccttccccgatgccatggtcaagagcctggcggaaatccccgccatgctgcgcagtcgggcggcctga

SEQ ID NO: 157637 - protein, 229 aa, Alkalilimnicola ehrlichei MLHE-1
MKADLSRIRAVLYDLDGTLVDSAPDLAVAVNRVLADLGQQPREENEIRRWVGNGARRLIMRALTGEHEGDPGDEHTDPALEQFFEYYGERVAERSRLYPGVAEGIAGVAELGIAQAVVTNKPRRFAEPLLETLGIRRYMATVVGGECAPVKKPDPAPLRLALERLGVEPAQALMVGDSAVDVGAARNTGMKVICVPYGYNAGNAIEDAFPDAMVKSLAEIPAMLRSRAA

SEQ ID NO: 157638 - DNA, 684 bp, Shewanella amazonensis SB2B
  CDS (1)..(684): transl_table=11
atgacactgatgaatcgtatccgtgccattgcttttgatttggatggcaccttggttgacagtgtgccggatctcgccgcggccaccaatgacactcttcgcgagctgaatttgccccagtgcaccgaagccgaagtgcggacatgggtggggaatggagccagggtcttgatggctcgtgccctgacccatgcactcgggcgcgatgtgaccggctctatgctcgacgatgccatgccgctctttatgcgccattatgaacgccatttggagtgtcacagccgtttgtatgatggggttatcgagacactcaacgagcttgctgccatggggatccgcatggctatcgttaccaataaaccccacagattcaccctgccattgctcagggcgtttggcatcgatgaccattttgagctggtgctcggtggtgattcgctggaacgaatgaaacctgatcccctgccgttgactcacattttggacagctggcagctcggccgtgacgaactcctgatggtgggcgacagccgcaacgatatactggccgccaaagcggctggaattgcatcctttggcttgacctacggctacaactacggtgaagatattgggctttctggcccagacgccgtatgtaacacctttgcagatatcttgactcgcctgacggcgacacactaa

SEQ ID NO: 157639 - protein, 227 aa, Shewanella amazonensis SB2B
MTLMNRIRAIAFDLDGTLVDSVPDLAAATNDTLRELNLPQCTEAEVRTWVGNGARVLMARALTHALGRDVTGSMLDDAMPLFMRHYERHLECHSRLYDGVIETLNELAAMGIRMAIVTNKPHRFTLPLLRAFGIDDHFELVLGGDSLERMKPDPLPLTHILDSWQLGRDELLMVGDSRNDILAAKAAGIASFGLTYGYNYGEDIGLSGPDAVCNTFADILTRLTATH

SEQ ID NO: 157640 - DNA, 672 bp, Azoarcus sp. BH72
  CDS (1)..(672): transl_table=11
atgacgcattttcccgcccgcgcagtgctgttcgacctcgacggcacgctgctcgacaccatcggcgacctcgccgaagcagccaaccgcatgctctccgaactcggtcggccgcaacgaccgttggaggaaatccacagcttcgtcggcaaggggttgccaaacctggtgtaccgctgcctcgccgagaacgcctcggcgaccgaagccgacgtggatgccgcgatcccggtgttccgccgccattacatcgcggtcaatggcgacaccacgcgcatctaccccggcattgtcgaaactctggagaccctgcgcgcgcgccgactcaaactcgcggtggtgaccaacaaggcgggcgatttcacccttccactgctcgaacgcatggacatcgcccgctatttccaggccgtcgtcagcggcgacaccctgccggtgaagaagcccgatccggcgatgctgattcatgcgtgcgagctgctcggcgtgagtccgcgcgaggccgtgatgatcggcgactcggccaacgacgcgctcgcggcccgcgctgcgggcatgccggtactgctcgtcagctatggctacagcgagggcatgccggtggacactatcgaatgcgatgggctactatccgacgcacttcaggcgctggaccatatcattccggcatga

SEQ ID NO: 157641 - protein, 223 aa, Azoarcus sp. BH72
MTHFPARAVLFDLDGTLLDTIGDLAEAANRMLSELGRPQRPLEEIHSFVGKGLPNLVYRCLAENASATEADVDAAIPVFRRHYIAVNGDTTRIYPGIVETLETLRARRLKLAVVTNKAGDFTLPLLERMDIARYFQAVVSGDTLPVKKPDPAMLIHACELLGVSPREAVMIGDSANDALAARAAGMPVLLVSYGYSEGMPVDTIECDGLLSDALQALDHIIPA

SEQ ID NO: 157642 - DNA, 690 bp, Marinobacter aquaeolei VT8
  CDS (1)..(690): transl_table=11
atgagcctgaaaggcctgttcaacgcccgctggccgggagtcgccctgtttgatctggacggcacgctggtagacagcgcaccggatctggccgccgccgtggatcagatgctggagcacctggggcgtagcccggcaggcatggacaaggtgcgcacctgggttggcaacggcgcccaggttctggtgcgccgggccctggccggaaaaaccgattgggaacccgccaccgctaaagatgaggcgctgttcaacgacgccctgaccattttctatcacgcctacggccagttgaatggccggcattcagaggtatttcccggcgtccaagactgcctggaccacctgcggcaactgggctgccgtatggccgtggtcactaacaaacctgaccagtttgttcagcccctgctggaaaaaaccggtctggatcagtggttcgacctctcggtcggtggcgataccctgccagtgaaaaaaccggacccggcgcccttgctgcacgccatggaaaaactgggcggcacacggggcaccacggtgatggtcggggactccaaagctgacgtcaatgcagccctggcagcaggcatcccctgcgtcgccgtcaggtatggctataactttggcggctccgttgacagtctcggtgcagatgctgttgttgattcgctggccgagcttttgtaa

SEQ ID NO: 157643 - protein, 229 aa, Marinobacter aquaeolei VT8
MSLKGLFNARWPGVALFDLDGTLVDSAPDLAAAVDQMLEHLGRSPAGMDKVRTWVGNGAQVLVRRALAGKTDWEPATAKDEALFNDALTIFYHAYGQLNGRHSEVFPGVQDCLDHLRQLGCRMAVVTNKPDQFVQPLLEKTGLDQWFDLSVGGDTLPVKKPDPAPLLHAMEKLGGTRGTTVMVGDSKADVNAALAAGIPCVAVRYGYNFGGSVDSLGADAVVDSLAELL

SEQ ID NO: 157644 - DNA, 711 bp, Neisseria meningitidis FAM18
  CDS (1)..(711): transl_table=11
atgaatgcagccatcgaacacgtccaagccgtcgccttcgatttggacggcacactgtgcgattccgtccccgaccttgccgccgccgcagaagcgatgttggagcaactcggtatgaaaccgctgcctgcaaaagtggtcgaaagctatgtgggcgacggcatcggcaaactggttcaccgcgtcctcaccaacgaccgcgaccgcgaagccgattccgaactgtgggaaaaaggtttcgtatcctatatgaaatactaccgcgaccatttgagcgtcttcacccgcccctatcccaaaaccgaagccgggctggcattgctcaaatctttaggcatcccgctcgccgtcgttaccaacaaaaacgaaatccttgccgtcgaactgttgaaacagctcggacttgccgactacttcagcctgatactcggcggcgacagcctgcccgagaaaaaacccagccccctgccgctgcggcatgccgccgaagttttgggtatcgatgttgcaaacatggttatggtcggcgactcgcgcaacgacatcatcgccgccaaagccgccggctgcctgagcgtcggcgttaccttcggttacggcgatatgacgctgctctcgcaagacgatgcgacccgccccgactggattatcggctcgctgcccgaaatttacgaaaacctgcaaccgcagaaaaataaagacgaagaataa

SEQ ID NO: 157645 - protein, 236 aa, Neisseria meningitidis FAM18
MNAAIEHVQAVAFDLDGTLCDSVPDLAAAAEAMLEQLGMKPLPAKVVESYVGDGIGKLVHRVLTNDRDREADSELWEKGFVSYMKYYRDHLSVFTRPYPKTEAGLALLKSLGIPLAVVTNKNEILAVELLKQLGLADYFSLILGGDSLPEKKPSPLPLRHAAEVLGIDVANMVMVGDSRNDIIAAKAAGCLSVGVTFGYGDMTLLSQDDATRPDWIIGSLPEIYENLQPQKNKDEE

SEQ ID NO: 157646 - DNA, 675 bp, Haemophilus influenzae R2866
  CDS (1)..(675): transl_table=11
atgaatacacaatttaaacttattggctttgatttagacggcaccttggtaaatagcttgcctgatttggcattatcagtaaattctgctttggctgaatttgatttaccgaaagcgccagaagaattagttttaacttggatcggtaatggcgcgcctgtattaattgctcgagcgttagattgggcgaaaaaacaaacaggaaaagtgctaactgaaacggaggttaagcaagtaacagaacgttttaatttttattatggcgagaatttatgtaatgtcagccgcttgtatccaaatgtaaaagaaactttagaaaccttgaaagaaaaaggctatgtcctagcagttgttaccaataaacccacaagacatgttcaacctgtgttggcagcatttggcattgatcatttatttagtgaaatgttgggcggtcaatccttgcctgccattaagccacatccagctccactttattatttatgcggaaaatttggttttgaaccacgccaagtgcttttcgtgggcgattctaaaaatgatattatcgcaggtcacgctgcgggctgtgcagttgttggtttaacttacggctacaattacaatatccctatccgtgaatccaatccagattgggtgtttgatgattttgcccagctattaagtattctttaa

SEQ ID NO: 157647 - protein, 224 aa, Haemophilus influenzae R2866
MNTQFKLIGFDLDGTLVNSLPDLALSVNSALAEFDLPKAPEELVLTWIGNGAPVLIARALDWAKKQTGKVLTETEVKQVTERFNFYYGENLCNVSRLYPNVKETLETLKEKGYVLAVVTNKPTRHVQPVLAAFGIDHLFSEMLGGQSLPAIKPHPAPLYYLCGKFGFEPRQVLFVGDSKNDIIAGHAAGCAVVGLTYGYNYNIPIRESNPDWVFDDFAQLLSIL

SEQ ID NO: 157648 - DNA, 702 bp, Azotobacter vinelandii
  CDS (1)..(702): transl_table=11
gtgacgcccctgcacgcgctgttcgacgggcgcctgccgaaactggcgatgttcgacctcgacggcaccctggtggactcggtgccggacctggcggcggcggtcgaccgcatgctcgtccggctcggccgggcgccggccggtgtggaacgggtgcgcctgtgggtcggcaacggcgcgcgggtgctggtgcgccgcgccctggccggcgacctcgaccaccagggcgtggacgccgccgaggccgaggcggcgctggcgctgttcatggacgcctacgccgacagccacgggctgacccgcgtctatcccggcgtgccggaaaccctcgactggctgcgcgagcgcgaggtggccctcgccctgatcaccaacaagccgtcgcgctttttgcccgagctgctggccgacaaggggctggacggctacttccgctggatcgtcggcggcgacaccctgccgcagcagaagcccgatccggcggcgctgttctgggtgatggcgcaggccggcgtgctggcggaagaagcactgttcgtcggcgactcgcgcaacgacgtgctcgccgcccgggcggcgggcgtcgcctgcgtggcgctgtcctacggctataaccacggccggccgatcgccgaggaggggccggcgctggtgctcgacgcgctgtccgcgctggttgatccgacaccggggctgcgctag

SEQ ID NO: 157649 - protein, 233 aa, Azotobacter vinelandii
MTPLHALFDGRLPKLAMFDLDGTLVDSVPDLAAAVDRMLVRLGRAPAGVERVRLWVGNGARVLVRRALAGDLDHQGVDAAEAEAALALFMDAYADSHGLTRVYPGVPETLDWLREREVALALITNKPSRFLPELLADKGLDGYFRWIVGGDTLPQQKPDPAALFWVMAQAGVLAEEALFVGDSRNDVLAARAAGVACVALSYGYNHGRPIAEEGPALVLDALSALVDPTPGLR

SEQ ID NO: 157650 - DNA, 690 bp, Nitrococcus mobilis Nb-231
  CDS (1)..(690): transl_table=11
atgttctcagacgttcgtgtcgtattgttcgatctcgacggtacgctagtggataccgcccctgacttggcggcggccacggatcatatgctcgagagcctcagcctcccgccggtcggcgaggcgagggtacgtacttggatcggccacggcgtgaaccacctcatcaagcgcgcactcgccgcgaccagcggcagcgagcaggaggagctgttcgagtcgggttcacggctattcctggattattacgccggccatcttgccgatcgcacctcgccctacccaggtgtggtcgaggctctcgatgagttggttgggcgcggcttacacctgggagtggtgaccaataaacccgcgcggttcacggaaccgcttttggaatcactcggtctgcgcgatgcgttccaggccgtggtaacgggggatgctgtcaccgagcagaagcctgccccagagccgatgctaaaggctgtccgtttgtgcggggggatcccccaacaagcgatcatggtaggtgattcgatgaccgatgtcgaagccgcgcgacgggcggggttgggcgtaatcggtgtgccgtacggatataatcatggtgataagcttttttggacggcgcctgatttgatgattcaatcgctggccgagcttccggccttactcgaaagtaacaaagcagacgaatgcggctga

SEQ ID NO: 157651 - protein, 229 aa, Nitrococcus mobilis Nb-231
MFSDVRVVLFDLDGTLVDTAPDLAAATDHMLESLSLPPVGEARVRTWIGHGVNHLIKRALAATSGSEQEELFESGSRLFLDYYAGHLADRTSPYPGVVEALDELVGRGLHLGVVTNKPARFTEPLLESLGLRDAFQAVVTGDAVTEQKPAPEPMLKAVRLCGGIPQQAIMVGDSMTDVEAARRAGLGVIGVPYGYNHGDKLFWTAPDLMIQSLAELPALLESNKADECG

SEQ ID NO: 157652 - DNA, 681 bp, Pseudoalteromonas tunicata D2
  CDS (1)..(681): transl_table=11
atgaccttttttgctaaagagctgattatttttgatttagatggcactttaatagacagcgctcctgatttagcgctaacaattaatttaatgctggctgatttacaacttgagccagttgatgagtcgcttatccgtacttgggttggcaatggcgcacaagtattggtggagcgtgctttagcgcatgcatacttatcaaaacctgtagagctgagcttaattgatgatgctctcgctattttcttaaatcattatcagcataatttagtggtaaagagccgcctttacccagatgtatatcgcacgttaacgacattgaaacagcaaggatttacccttgctttaattactaataaaccggagcgttttattgccccgatattggctgcaatagagctaaattcactatttagtaatgtattgggaggcgatagtttagcgcgtaaaaagcccgatcctctacctctgattactgcgtgccaacaactcgacttttcggttgaacaagctgtgatggtcggagattcaaaaaatgatattttggccgccaaagccgctaaaatgcaaagtgtcggccttacttatggctacaattatggcgaacccattgctaattccaaaccagatttagtgctcgatcattttgcaaaattaattgaccatcttgttcgggtttag

SEQ ID NO: 157653 - protein, 226 aa, Pseudoalteromonas tunicata D2
MTFFAKELIIFDLDGTLIDSAPDLALTINLMLADLQLEPVDESLIRTWVGNGAQVLVERALAHAYLSKPVELSLIDDALAIFLNHYQHNLVVKSRLYPDVYRTLTTLKQQGFTLALITNKPERFIAPILAAIELNSLFSNVLGGDSLARKKPDPLPLITACQQLDFSVEQAVMVGDSKNDILAAKAAKMQSVGLTYGYNYGEPIANSKPDLVLDHFAKLIDHLVRV

SEQ ID NO: 157654 - DNA, 687 bp, Photobacterium sp. SKA34
  CDS (1)..(687): transl_table=11
atggtatttgaaaacatcaagtttatagcgtttgatttagatggcacattactcgatagcgtacctgatttagcggatgctgcagataaaacgatgcgtcatcttggacgagaaggcgtgacggtagagcaagttactacttggatcggtaatggtgctgatattttaattggtcgcgcattaagccgaagtgttgatgtcgatccagcgattgatccagaactgcaaaaagaagctcgccaattatttgatcactactacgagcttggcggtcatgtaaaaagtgcattgtatgctgacgtaaaagcgacactcgctgcatttcatcaagcgggtatgtcaatggcgattgtgaccaataaaccctcgcaatttgtcccgcatttacttgaagagcatggcatcagcgagtattttgttgatgtgattggtggtgatactttcccactgaaaaaaccagatccttatgcactgcattggttaatggaaaaacataatattgccgcgtctgagatgttaatggtgggggattctcgcaatgatatcttggcagcaaaagctgcaacatgctattcgttgggcttaacctatggctataactacggtcagcctattgcagagagtgcacctgatgttgtgtgcgatcacttcaagcaattagcaaatgtggttaaactaggcgactag

SEQ ID NO: 157655 - protein, 228 aa, Photobacterium sp. SKA34
MVFENIKFIAFDLDGTLLDSVPDLADAADKTMRHLGREGVTVEQVTTWIGNGADILIGRALSRSVDVDPAIDPELQKEARQLFDHYYELGGHVKSALYADVKATLAAFHQAGMSMAIVTNKPSQFVPHLLEEHGISEYFVDVIGGDTFPLKKPDPYALHWLMEKHNIAASEMLMVGDSRNDILAAKAATCYSLGLTYGYNYGQPIAESAPDVVCDHFKQLANVVKLGD

SEQ ID NO: 157656 - DNA, 678 bp, Neptuniibacter caesariensis
  CDS (1)..(678): transl_table=11
atgatgcgtgagcttttttccggcgatatgccgcagctggtcttgtttgatcttgatgggacgctggtggatagcgttccagatctggcgcaggctgtggataaaatgctctgtgccctcgaccggccagtggcgggtctggaaaaagtgaggacgtgggtcggcaacggcgcagcgatgctggttaagcgcgctctggcagatgatctttacccctctggcgaagaggatgatcagtatcggcgcgcgtataatcttttcctggatttttatgcgcaggctacggctgatcaaagtgagctgtacccaggagtgcgtgagtgtctcgagtcgcttgccgtctccggcgtaaggttggggttggttacgaataaacctatgcggtttacccgatccatgctggaagggttgcagctcgatagctattttggagttgtgtttggtggtgatagctttcctgagaaaaagcctcatccccgtcctttgcaggaagccatggtcgcatgtggcgtggagcctgacgtaactttgatggttggggattcagttagtgatgtccgagccgctcgtgctgcgggttgcccggttgtttgtgtgccttatggctataaccatggttcccctatatcggaaagccagcctgatctgattgttgaaacgctggatcagatgatctga

SEQ ID NO: 157657 - protein, 225 aa, Neptuniibacter caesariensis
MMRELFSGDMPQLVLFDLDGTLVDSVPDLAQAVDKMLCALDRPVAGLEKVRTWVGNGAAMLVKRALADDLYPSGEEDDQYRRAYNLFLDFYAQATADQSELYPGVRECLESLAVSGVRLGLVTNKPMRFTRSMLEGLQLDSYFGVVFGGDSFPEKKPHPRPLQEAMVACGVEPDVTLMVGDSVSDVRAARAAGCPVVCVPYGYNHGSPISESQPDLIVETLDQMI

SEQ ID NO: 157658 - DNA, 690 bp, Photobacterium profundum 3TCK
  CDS (1)..(690): transl_table=11
atgaagcaatttgaaggcattaaatttattgcttttgaccttgatggaacgttgcttgatagcgttcctgatttggcagaagccgctgataaagcgatgcaggcattaggtcgtgatagagtgaccgtcgagcaggtaacaacgtggataggtaacggggctgatattcttattggtcgtgcgcttagccagagccttgaacttgacccagagctggatcctgcacttcatcaagaagcgcgcgcattatttgatcgcttttacgatgaaggtggccataagaaaagtcacttatatacaggtgtaaaagaaacattggcagcgttccacaacgccaatattccaatggcaatcgtgaccaataaaccagctcagtttgtaccacatttacttgagcagcacggtattagtgagtattttgttgatgtgattggtggtgatacctttccattgaaaaaaccggatccatttgcgctgcattggttgatggaaaagcatcaattagccgccagcgaaatgctgatgatcggtgattcacgtaatgatattctggcagcaaaggcggcaacatgtcatgttgttggtctcacttacggttacaattacggtcaaccaatcagcgctagtaacccagatgttgtgctagatcactttagtcaattactggatgtggttaaactagcttgctag

SEQ ID NO: 157659 - protein, 229 aa, Photobacterium profundum 3TCK
MKQFEGIKFIAFDLDGTLLDSVPDLAEAADKAMQALGRDRVTVEQVTTWIGNGADILIGRALSQSLELDPELDPALHQEARALFDRFYDEGGHKKSHLYTGVKETLAAFHNANIPMAIVTNKPAQFVPHLLEQHGISEYFVDVIGGDTFPLKKPDPFALHWLMEKHQLAASEMLMIGDSRNDILAAKAATCHVVGLTYGYNYGQPISASNPDVVLDHFSQLLDVVKLAC

SEQ ID NO: 157660 - DNA, 687 bp, Aurantimonas sp. SI85-9A1
  CDS (1)..(687): transl_table=11
atggccggacgctggccgcaggcggtcctcttcgatctcgacggcaccctcgtcgattctgcccccgacatccacgccgcgctgaacgagacgctggcaagctatggcgagccgcccttcacgctggaggcggtgacccgcatggtcggccgcggcgtgccggtgctcatcgagcgcgcctgggagggactcggcaagagcatcgacccggccgagcgcgaacgcgtggtcgcgcgcttcctggcgatctacgagccgcgtgccaccgagttgacgacgctgaccgccggcgccagcgaggcgacccgcgccctggtcgacgccggcaccccgatcggtgtcgtcacgaacaagcccgaagccgcgacgcgcgagatcctcagccatttcggcctgtcggaactgatgcaggtggtggtcggcggcgatgccggcccggcgaagaagccggagccgggcctgttgcttttggcctgcgagcgcctgggcctcgccgtcggccaggtcgtctttgtcggcgacagcgagaacgacgtggccgccgcgaaggccgccggcatggcggtcgtggtcctgcggggcggttatacgagcatcgccgccgacgctctcggcgcggatgcggtcgtggatcgcctcgacgcgctcggcgacgtcgtttcgaccctgcggccagcctcggcctga

SEQ ID NO: 157661 - protein, 228 aa, Aurantimonas sp. SI85-9A1
MAGRWPQAVLFDLDGTLVDSAPDIHAALNETLASYGEPPFTLEAVTRMVGRGVPVLIERAWEGLGKSIDPAERERVVARFLAIYEPRATELTTLTAGASEATRALVDAGTPIGVVTNKPEAATREILSHFGLSELMQVVVGGDAGPAKKPEPGLLLLACERLGLAVGQVVFVGDSENDVAAAKAAGMAVVVLRGGYTSIAADALGADAVVDRLDALGDVVSTLRPASA

SEQ ID NO: 157662 - DNA, 687 bp, Vibrio angustum S14
  CDS (1)..(687): transl_table=11
atggtatttgaaaacatcaagtttatagcgtttgatttagatggcacattactcgatagcgtacctgatttagcggatgctgctgataaaacgatgcgtcatcttggacgagaaggtgtgaccgtagagcaagttaccacttggatcggtaatggtgctgatattttaattggtcgcgcattaagccgcagtgttgatgtcgatccaacgattgatcctgaacttcaaaaagaagctcgccaattatttgatcactactacgagcttggcggtcatgtaaaaagtgcattgtatgccgacgtaaaagcgacacttgctgcatttcatcaagcgggtatgtcaatggcgattgtaactaataaaccctcgcaatttgtcccgcatttacttgaagagcatggcatcagcgagtattttgtggatgtgattggtggtgatactttcccactgaaaaaaccagatccttatgcgctacattggttgatggaaaaacacaatattgccgcgtctgagatgttaatggtgggggattctcgcaatgatatcttggcagccaaagctgcaacatgtcattcgttgggtttaacctatggctataactacggccagcctattgcagagagtgagcctgatgtcgtgtgcgatcacttcaagcaattaacaaatgtggttaaactaggcggctag

SEQ ID NO: 157663 - protein, 228 aa, Vibrio angustum S14
MVFENIKFIAFDLDGTLLDSVPDLADAADKTMRHLGREGVTVEQVTTWIGNGADILIGRALSRSVDVDPTIDPELQKEARQLFDHYYELGGHVKSALYADVKATLAAFHQAGMSMAIVTNKPSQFVPHLLEEHGISEYFVDVIGGDTFPLKKPDPYALHWLMEKHNIAASEMLMVGDSRNDILAAKAATCHSLGLTYGYNYGQPIAESEPDVVCDHFKQLTNVVKLGG

SEQ ID NO: 157664 - DNA, 819 bp, Pseudomonas aeruginosa PACS2
  CDS (1)..(819): transl_table=11
atgagcgctgcggagccgttcttcgccacgcgcctgccgcgtctggtgatgttcgacctggatggcacgttggtcgattccgttcccgacctcaccgccgcggtcgacagcatgctcgccagcctcgggcggccaccggcgggcatcgagaaggtccgccagtggatcggtaacggcgcgcgtgtgctggtgcgtcgcgccctggcgggaagcatcgagcatgacggcattggtgaggaagaaaccgaagccgcgctggcgctgttcatggaggcctatgccgacagtcatgcgctcaccgaggtctaccccggcgtcgtcgacaccctcaagtggctcaagcgcaacggcgtggaaatggcgctgatcaccaacaagccggagcgcttcgtcgctccgctgctggatgagatgaagctgggtcgctatttccgctggatcatcggcggcgacaccctgccgcagcagaagcccgacccggcggcgctgctgttcgtgatgaagatggccggcatcgagcccgaagatgcgttgttcgtcggtgactcgcgcaacgacgtgctcgccgccaaggctgccggtgtgcgctgcgcggcgctgacctatggctacaaccacggccggccgatcgccgaggaagcgcccaccctggtcatcgacaacctgcgcgacctgctgccttgcgccgaccaggccgctgagatagtgttgccggacgactccctttccccctccgaccagcgagatcaagccgtggcggtcagcaaactctggatgaaggtcatcaaggccctggcgcgttggcgctggcgcgcctga

SEQ ID NO: 157665 - protein, 272 aa, Pseudomonas aeruginosa PACS2
MSAAEPFFATRLPRLVMFDLDGTLVDSVPDLTAAVDSMLASLGRPPAGIEKVRQWIGNGARVLVRRALAGSIEHDGIGEEETEAALALFMEAYADSHALTEVYPGVVDTLKWLKRNGVEMALITNKPERFVAPLLDEMKLGRYFRWIIGGDTLPQQKPDPAALLFVMKMAGIEPEDALFVGDSRNDVLAAKAAGVRCAALTYGYNHGRPIAEEAPTLVIDNLRDLLPCADQAAEIVLPDDSLSPSDQRDQAVAVSKLWMKVIKALARWRWRA

SEQ ID NO: 157666 - DNA, 675 bp, Haemophilus influenzae 22.1-21
  CDS (1)..(675): transl_table=11
atgaatacacaatttaaacttattggctttgatttagacggcaccttggtaaatagcttgcctgatttagcgttatccgtaaattctgccttggctgaatttgatttaccgaaagcgccagaagaattagttttaacttggatcggcaatggtgcacctgtattaattgctcgagcgttaaattgggcgaaaaaacaaacaggaaaagtgctaactgaaacagaggttaagcaagtaacagaacgttttaatttttattatggcgagaatttatgtaatgtcagccgcttgtatccaaatgtaaaagaaactttagaaatcctgaaagaaaaaggctatgccctagcagttgttacgaataaaccgacaaagcacgttcaacctgtgttggcagcatttggcattgatcatttatttagtgaaatgttgggcggccaatccttacctgccattaagccacatccagctcctctttattatttatgcggaaaatttggttttgaaccacgccaagtgcttttcgtgggcgattctaaaaatgatattatcgcaggtcacgctgcgggctgtgcagttgttggtttaacttacggctacaattacaatatccctatccgtgaatccaatccagattgggtgtttgatgattttgcccagctattaagtattctttaa

SEQ ID NO: 157667 - protein, 224 aa, Haemophilus influenzae 22.1-21
MNTQFKLIGFDLDGTLVNSLPDLALSVNSALAEFDLPKAPEELVLTWIGNGAPVLIARALNWAKKQTGKVLTETEVKQVTERFNFYYGENLCNVSRLYPNVKETLEILKEKGYALAVVTNKPTKHVQPVLAAFGIDHLFSEMLGGQSLPAIKPHPAPLYYLCGKFGFEPRQVLFVGDSKNDIIAGHAAGCAVVGLTYGYNYNIPIRESNPDWVFDDFAQLLSIL

SEQ ID NO: 157668 - DNA, 681 bp, Limnobacter sp. MED105
  CDS (1)..(681): transl_table=11
atgaccaagaaagcagtactgtttgatctggatggaacacttttgcacacggtgcccgatctggctgccgcggtgaatgccatgctggtcgacttgggcaaacctgttttgcccgaagacacagtggcggtgtatgtgggcaagggcgcggaaaacctggtgaaccgaagcttgactggcagcatgacagagaaggcctcgcctgagctgtatgcgcaggccatggccaactggcaaaaccattacacccacatcaacggcaatcactccgtgttttatcccggtgtgaaagaagggctggagatgttgaaaaacgcgggttacaaactggcggtggtgaccaacaagcccgaacgtttcaccaagcccttgctcgagcgcaccggtattgcccattactttgaagtcatggtgggtggcgatacctgcccggttaaaaaacccgatccaatgcctgtcactcacgcctgtgcgctgctcggcgtcgagcctgcccaggctttgatgatcggcgactcggtgaacgacgcgctggcggccaatgcagcaggcgtggagtgttggcttttgccctacggttacaacgagggacggtctgttcacgaaaccccatgcgatggaatcgtgaacacaatcgaggaagctgcacaacgccttctgggcacacgggtaccacaatga

SEQ ID NO: 157669 - protein, 226 aa, Limnobacter sp. MED105
MTKKAVLFDLDGTLLHTVPDLAAAVNAMLVDLGKPVLPEDTVAVYVGKGAENLVNRSLTGSMTEKASPELYAQAMANWQNHYTHINGNHSVFYPGVKEGLEMLKNAGYKLAVVTNKPERFTKPLLERTGIAHYFEVMVGGDTCPVKKPDPMPVTHACALLGVEPAQALMIGDSVNDALAANAAGVECWLLPYGYNEGRSVHETPCDGIVNTIEEAAQRLLGTRVPQ

SEQ ID NO: 157670 - DNA, 678 bp, Beggiatoa sp. PS
  CDS (1)..(678): transl_table=11
atgacacagttagaaaaacctgaattaattctgattgatcttgatggcactttgattgacactgtacctgatttggcttatgcaattgatggtatgatgtcacaattggatttgccacagcggggagaggaaaaagttcgacattggattggtaatggtatagagcgtttggtaaaacgcgcattattagatcaaatggatggtgaaccggatgaaacgttatttcaaacggcatttcatttatttaaagtcatttatgctcaatgtaatggcaatcagagccaattatacccaggggtagataaagctttagaatggcttaaatcgcaaaattatgtcttagcctgtattactaataaggctgaacaatttactatccccttgttaaaagcattaaaacttgagccctattttcagaaagtttattgcggcgatacgttagccaaaaaaaagccagatccattacctttactccatgcagctgactattttcaaagggacccaaaaaaatccttgatgataggtgattcaaaaaatgatgtgattgcagcacgagcggcgggatttgaaattatctgtgtcagttatggctataatcatggggaagatataaatacagctaatccttttgcggtggttgattcattggaagaattgccgaattttttaaaacaatag

SEQ ID NO: 157671 - protein, 225 aa, Beggiatoa sp. PS
MTQLEKPELILIDLDGTLIDTVPDLAYAIDGMMSQLDLPQRGEEKVRHWIGNGIERLVKRALLDQMDGEPDETLFQTAFHLFKVIYAQCNGNQSQLYPGVDKALEWLKSQNYVLACITNKAEQFTIPLLKALKLEPYFQKVYCGDTLAKKKPDPLPLLHAADYFQRDPKKSLMIGDSKNDVIAARAAGFEIICVSYGYNHGEDINTANPFAVVDSLEELPNFLKQ

SEQ ID NO: 157672 - DNA, 708 bp, Shewanella benthica KT99
  CDS (1)..(708): transl_table=11
atgacatgttggaaaaatatcaaggcgatcgcattcgatctcgatggtacactcatcgacagtgttccggatctcgccgccgccactcaggcgacgctgtctgagctcgatttacctggttgtaccgaagagcaagtgcgcggctgggtggggaatggcgctcagatgctgatgagccgggcgctaactcatgctctggagcgagaggtccagcaggatgagttagacaatgccatgcccaagtttatgcatcattatcaagataacttgcaacagcatagtcggctctatccttatgtgaaagagatcttagcgcaattgacggcgcttggttttcctctggcgattgtcaccaataagccatataggtttacccaaccactgctggaagcgttcgacatcagtcaacacttctctcatgttctaggtggtgactcactggcaagaatgaagccggatcccatgccattaactcaccttttatctcattggcagctcgagcccgatgagctcttgatggttggggattcaaaaaatgacattttagccgcaaaagccgctggtattacctcgataggcttgacctatgggtacaactacggtgaagatatcgggctaagtgacccggatgcggtctgtgagcaatttagcgacatcatggcgctggtaaataccagcctcaaagtaacggagcaaaaaaacctatga

SEQ ID NO: 157673 - protein, 235 aa, Shewanella benthica KT99
MTCWKNIKAIAFDLDGTLIDSVPDLAAATQATLSELDLPGCTEEQVRGWVGNGAQMLMSRALTHALEREVQQDELDNAMPKFMHHYQDNLQQHSRLYPYVKEILAQLTALGFPLAIVTNKPYRFTQPLLEAFDISQHFSHVLGGDSLARMKPDPMPLTHLLSHWQLEPDELLMVGDSKNDILAAKAAGITSIGLTYGYNYGEDIGLSDPDAVCEQFSDIMALVNTSLKVTEQKNL

SEQ ID NO: 157674 - DNA, 687 bp, Vibrio campbellii AND4
  CDS (1)..(687): transl_table=11
atgactcaacaagacattaaattcatcgccttcgatcttgatggtacccttcttgatagcgtgcctgatctggcggtagcggccgaccaagcagcgcaagcgcttggctttccatcggtttcagaagagcaagttcgtgattacgtgggtaatggcgccgacgtattgatcggtcgtgcattgagccaaagcctcaccatcaatccagagttaagtgaagaactgcgcgctaaagcgcgtgtactgtttgatgactactacgagcaaagcggtcacaagttaagccacctttaccccgaggtaaaggagacgcttgaagaactacacaaaacaggctttgtgatggcgttggtcaccaataagccctcaaagtttgtacctgaggttctggaaaagcacgacatcgcaaaatactttgttgatgtgctaggcggtgacgcgttcccagagaaaaaacctaacccaattgcactgaactggttgatggagaaacaccaaatccaacccagtgaaatgctgatggttggcgactcgaaaaacgatattctcgcggcgaaaaatgccggttgtgcctcatttggcctgacttatggttataaccatggtgaaccaatcgcagcatccaatccggattttgtggcagacagtttggctgaattattggaagtggtagcggtttcggcataa

SEQ ID NO: 157675 - protein, 228 aa, Vibrio campbellii AND4
MTQQDIKFIAFDLDGTLLDSVPDLAVAADQAAQALGFPSVSEEQVRDYVGNGADVLIGRALSQSLTINPELSEELRAKARVLFDDYYEQSGHKLSHLYPEVKETLEELHKTGFVMALVTNKPSKFVPEVLEKHDIAKYFVDVLGGDAFPEKKPNPIALNWLMEKHQIQPSEMLMVGDSKNDILAAKNAGCASFGLTYGYNHGEPIAASNPDFVADSLAELLEVVAVSA

SEQ ID NO: 157676 - DNA, 759 bp, Salmonella enterica subsp. enterica serovar Saintpaul str. SARA29
  CDS (1)..(759): transl_table=11
atgaataagttgcagaatattcggggcgtcgcctttgatcttgacggtacgctggtggatagcgcgccgggtcttgccgcggcggtggatatggcgctgtatgcgctggaactgccggtcgcgggcgaggagcgcgtgattacctggattggtaacggcgcagacgtattgatggaacgcgcgctgacctgggctcgccaagagcgcgccacgctgcgtaagacgttggggaaaccgcccgttgatgaagatattcctgccgaggaacaggtacgcattctgcgtaaactgttcgacaggtattatggcgaagtggcggaagagggcacctttttatttccgcatgtcgccgacacgctgggcgcgctgcacgccagcggattgtcattaggtctggtgacgaataagccgacgccgttcgtcgcgccgttgctggaatcgcttgatatcgccaaatactttagcgtggttatcggcggcgatgatgtgcaaaataagaagccgcatccagagccgctgttgctggtggcaagccgactgggcatgacgccggagcagatgctttttgtcggcgattcgcgtaatgatattcaggccgcaaaagcggcgggctgcccttcggttggcctgacatacggctacaattatggcgaagcgatcgcccttagcgagccggacgtcatttatgacagttttaacgatcttttgcccgcacttgggcttccgcatagcgataaccaggaaataaaaaatgactaa

SEQ ID NO: 157677 - protein, 252 aa, Salmonella enterica subsp. enterica serovar Saintpaul str. SARA29
MNKLQNIRGVAFDLDGTLVDSAPGLAAAVDMALYALELPVAGEERVITWIGNGADVLMERALTWARQERATLRKTLGKPPVDEDIPAEEQVRILRKLFDRYYGEVAEEGTFLFPHVADTLGALHASGLSLGLVTNKPTPFVAPLLESLDIAKYFSVVIGGDDVQNKKPHPEPLLLVASRLGMTPEQMLFVGDSRNDIQAAKAAGCPSVGLTYGYNYGEAIALSEPDVIYDSFNDLLPALGLPHSDNQEIKND

SEQ ID NO: 157678 - DNA, 759 bp, Salmonella enterica subsp. enterica serovar Kentucky str. CDC 191
  CDS (1)..(759): transl_table=11
atggataagttacagaatattcggggcgtcgcctttgatcttgacggtacgctggtggatagcgcgccgggtcttgccgcggcggtggatatggcgctgtatgcgctggaactgccggtcgcgggcgaggagcgcgtgattacctggattggtaacggcgcagacgtattgatggaacgcgcgctgacctgggctcgcgaggagcgcgccacgctgcgtaagacgatggggaaaccgcccgttgatgaagatattcctgccgaggaacaggtacgcattctgcgtaaactgttcgacaggtattatggcgaagtggcggaagaaggcacctttttatttccgcatgtcgccgacacgctgggcgcgctgcacgccagcgggttgtcattaggtctggtgacgaataagccgacgccgttcgtcgcgccgttgctggaatcgcttgatatcgccaaatactttagtgtggttatcggcggcgatgatgtgcaaaataagaagccgcatccggagccgctgttgctggtggcaagccggctgggcatgatgccggagcagatgctttttgtcggcgattcgcgtaatgatattcaggctgcaaaagcggcgggctgcccttcggttggcctgacatacggctacaattatggcgaagcgatcgctcttagcgagccggacgtcatttatgacagttttaacgatcttttgcccgcacttgggcttccgcatagcgataaccaggaaataaaaaatgactaa

SEQ ID NO: 157679 - protein, 252 aa, Salmonella enterica subsp. enterica serovar Kentucky str. CDC 191
MDKLQNIRGVAFDLDGTLVDSAPGLAAAVDMALYALELPVAGEERVITWIGNGADVLMERALTWAREERATLRKTMGKPPVDEDIPAEEQVRILRKLFDRYYGEVAEEGTFLFPHVADTLGALHASGLSLGLVTNKPTPFVAPLLESLDIAKYFSVVIGGDDVQNKKPHPEPLLLVASRLGMMPEQMLFVGDSRNDIQAAKAAGCPSVGLTYGYNYGEAIALSEPDVIYDSFNDLLPALGLPHSDNQEIKND

SEQ ID NO: 157680 - DNA, 759 bp, Salmonella enterica
  subsp. enterica serovar Schwarzengrund str. SL480
  CDS (1)..(759): transl_table=11
atggataagttgcagaatattcggggcgtcgcctttgatcttgacggcacgctggtggatagcgcgccgggtcttgccgcggcggtggatatggcgctgtatgcgctggaactgccggtcgcgggcgaggagcgcgtgattacctggattggtaacggcgcagacgtattgatggaacgcgcgctggcctgggctcgcgaggagcgcgccacgctgcgtaagacgatggggaaaccgctcgttgatgaagatattcctgccgaggaacaggtacgcattctgcgtaaactgttcgacaggtattatggcgaagtggcggaagaaggcacctttttatttccgcatgtcgccgacacgctgggcgcgctgcacgccagcggattgtcattaggtctggtgacgaataagccgacgccgttcgtcgcgccgttgctggaatcgcttgatatcgccaaatactttagtgtggttatcggtggcgatgatgtgcaaaataagaagccgcatccggagccgctgttgctggtggcaagccggctgggcatgatgccggagcagatgctttttgtcggcgattcgcgtaatgatattcaggctgcaaaagcggcgggctgcccttcggttggcctgacatacggctacaattatggcgaagcgatcgctcttagcgagccggacgtcatttatgacagttttaacgatcttttgcccgcacttgggcttccgcatagcgataaccaggaaataaaaaatgactaa

SEQ ID NO: 157681 - protein, 252 aa, Salmonella enterica
  subsp. enterica serovar Schwarzengrund str. SL480
MDKLQNIRGVAFDLDGTLVDSAPGLAAAVDMALYALELPVAGEERVITWIGNGADVLMERALAWAREERATLRKTMGKPLVDEDIPAEEQVRILRKLFDRYYGEVAEEGTFLFPHVADTLGALHASGLSLGLVTNKPTPFVAPLLESLDIAKYFSVVIGGDDVQNKKPHPEPLLLVASRLGMMPEQMLFVGDSRNDIQAAKAAGCPSVGLTYGYNYGEAIALSEPDVIYDSFNDLLPALGLPHSDNQEIKND

SEQ ID NO: 157682 - DNA, 759 bp, Salmonella enterica subsp. enterica serovar Heidelberg str. SL486
  CDS (1)..(759): transl_table=11
atggataagttacagaatattcggggcgtcgcctttgatcttgacggtacgctggtggatagcgcgccgggtcttgccgcggcggtggatatggcgctgtatgcgctggaactgccggtcgcgggcgaggagcgcgtaattacctggattggtaacggcgcagacgtattgatggaacgcgcgctgacctgggctcgccaagagcgcgccacgctgcgtaagacgatggggaaaccgcccgttgatgaagatattcctgccgaggaacaggtacgtattctgcgtaaactgttcgacaggtattatggcgaagtggcggaagaaggcacttttttatttccgcatgtcgccgacacgctgggcgcgctgcacgccagcggattgtcattaggtctggtgacgaataagccgacgccgttcgtcgcgccgttgctggaatcgcttgatatcgccaaatactttggtgtggttatcggcggcgatgatgtgcaaaataagaagccgcatccggagccgctgttgctggtggcaagccggctgggcatgatgccggagcagatgctttttgtcggcgattcgcgtaatgatattcaggctgcaaaagcggcaggctgcccttcggttggcctgacatacggctacaattatggcgaagcgatcgcccttagcgagccggacgtcatttatgacagttttaacgaccttttgcccgcacttgggcttccgcatagcgataaccaggaaataaaaaatgactaa

SEQ ID NO: 157683 - protein, 252 aa, Salmonella enterica subsp. enterica serovar Heidelberg str. SL486
MDKLQNIRGVAFDLDGTLVDSAPGLAAAVDMALYALELPVAGEERVITWIGNGADVLMERALTWARQERATLRKTMGKPPVDEDIPAEEQVRILRKLFDRYYGEVAEEGTFLFPHVADTLGALHASGLSLGLVTNKPTPFVAPLLESLDIAKYFGVVIGGDDVQNKKPHPEPLLLVASRLGMMPEQMLFVGDSRNDIQAAKAAGCPSVGLTYGYNYGEAIALSEPDVIYDSFNDLLPALGLPHSDNQEIKND

SEQ ID NO: 157684 - DNA, 759 bp, Escherichia albertii TW07627
  CDS (1)..(759): transl_table=11
atggataagtttgaagatattcgcggcgtcgcttttgatctcgacggtacgctggtcgacagtgctcccggtctggctgccgcggtagatatggcgttgtacgcgctggagttgcctgtcgcaggtgaagaacgcgttattacctggattggtaatggcgcagatgtcctgatggagcgagcactgatctgggctcgccaggaacgtgcgaccctgcgtaaaacgatgggtaaaccccccgttgatgatgacgttccgttaccggaacaagttcgtattttgcgtaagttgttcgatcgctattatggcgaggttgccggggaagggacgtttttgttcccgcacgttgccgatacgcttggcgcgttgcaggctaaagggctgccgttaggtgtagtcaccaataaaccgacgccgtttgttgcgccgctgttggaatccttagatattgcaaaatactttagcgtggttatcggcggcgatgatgtgaaaaataaaaagccgcacccggacccgctgttactggtggcagaacggatgggcattgccccacaacagatgctgtttgtcggtgattcccgcaatgatattcaggcagcaaaagcagccggttgcccatcagttggcttaacctacggatataactacggcgaggctatcgatctcagccagcctgatgtaatttatcactctataaatgaccttctgcccgcattagggcttccgcatagcgaaaatcaggaatcgaaaaatgactaa

SEQ ID NO: 157685 - protein, 252 aa, Escherichia albertii TW07627
MDKFEDIRGVAFDLDGTLVDSAPGLAAAVDMALYALELPVAGEERVITWIGNGADVLMERALIWARQERATLRKTMGKPPVDDDVPLPEQVRILRKLFDRYYGEVAGEGTFLFPHVADTLGALQAKGLPLGVVTNKPTPFVAPLLESLDIAKYFSVVIGGDDVKNKKPHPDPLLLVAERMGIAPQQMLFVGDSRNDIQAAKAAGCPSVGLTYGYNYGEAIDLSQPDVIYHSINDLLPALGLPHSENQESKND

SEQ ID NO: 157686 - DNA, 759 bp, Escherichia coli E110019
  CDS (1)..(759): transl_table=11
atgaataagtttgaagatattcgcggcgtcgcttttgatcttgatggtacgctggtcgacagtgctcccggtcttgctgctgcggtagatatggcgctgtatgcgctggagttgcccatcgcaggtgaagaacgcgttattacctggattggtaacggcgcagatgttctgatggagcgcgcattgacctgggcgcgtcaggaacgtgcgactctgcgtaaaacaatgggtaaaccgcccgttgatgacgacattccggcagaagaacaggtacgtattctgcgtaaactgttcgatcgctactatagcgaggttgccgaagaggggacgtttttgttcccgcacgttgccgatacgttgggcgcgttgcaggctaaaggcctgccgctaggcctggtcaccaacaaaccgacgccgttcgtcgcgccgctgctcgaagccttagatattgccaaatactttagcgtggttatcggcggcgatgatgtgcaaaacaaaaaaccgcatccggacccgctgttactggtggctgagcggatgggaattgccccacaacagatgctgtttgtcggcgactcacgcaatgatattcaggcggcaaaagcggcaggttgcccatcagttggcttaacctacggatataactacggcgaggctatcgatctcagccagcctgatgtaatttatcagtctataaatgaccttctgcccgcattagggcttccgcatagcgaaaatcaggaatcgaaaaatgactaa

SEQ ID NO: 157687 - protein, 252 aa, Escherichia coli E110019
MNKFEDIRGVAFDLDGTLVDSAPGLAAAVDMALYALELPIAGEERVITWIGNGADVLMERALTWARQERATLRKTMGKPPVDDDIPAEEQVRILRKLFDRYYSEVAEEGTFLFPHVADTLGALQAKGLPLGLVTNKPTPFVAPLLEALDIAKYFSVVIGGDDVQNKKPHPDPLLLVAERMGIAPQQMLFVGDSRNDIQAAKAAGCPSVGLTYGYNYGEAIDLSQPDVIYQSINDLLPALGLPHSENQESKND

SEQ ID NO: 157688 - DNA, 759 bp, Shigella dysenteriae 1012
  CDS (1)..(759): transl_table=11
atgaataagtttgaagatattcgcggcgtcgcttttgatcttgatggtacgttggtcgacagtgctcctggtcttgctgctgcggtagatatggcgctgtatgcgctggagttgcccgtcgcaggtgaagaacgcgttattacctggattggtaacggcgcagatgttctgatggagcgcgcattgacctgggcgcgtcaggaacgtgcgactctgcgtaaaacaatgggcaaaccgcccgttgatgacgacattccggcagaagaacaggtacgtattctgcgtaaactgttcgatcgctactatggcgaggttgccgaagaggggacgtttttgttcccgcacgttgccgatacgttgggcgcgttgcaggctaaaggcctgccgctaggcctggtcaccaacaaaccgacgccatccgtcgcgccgctgctcgaagccttagatattgccaaatactttagcgtggttatcggcggcgatgatgtggaaaacaaaaaacctcatccggacccgctgttactggtggctgagcggatgggaattgccccacaacagatgctgtttgtcggcgactcacgcaatgatattcaggcggcaaaagcggcaggttgcccatccgttggcttaacctacggatataactacggcgaggctatcgatctcagccagcctgatgtaatttatcagtctataaatgaccttctgcccgcattagggcttccgcatagcgaaaatcaggaatcgaaaaatgactaa

SEQ ID NO: 157689 - protein, 252 aa, Shigella dysenteriae 1012
MNKFEDIRGVAFDLDGTLVDSAPGLAAAVDMALYALELPVAGEERVITWIGNGADVLMERALTWARQERATLRKTMGKPPVDDDIPAEEQVRILRKLFDRYYGEVAEEGTFLFPHVADTLGALQAKGLPLGLVTNKPTPSVAPLLEALDIAKYFSVVIGGDDVENKKPHPDPLLLVAERMGIAPQQMLFVGDSRNDIQAAKAAGCPSVGLTYGYNYGEAIDLSQPDVIYQSINDLLPALGLPHSENQESKND

SEQ ID NO: 157690 - DNA, 681 bp, Thioalkalivibrio sp. HL-EbGR7
  CDS (1)..(681): transl_table=11
atgcccatagcccgacccaggatggtgctcatcgacctggacggcacgctggtggacagcgtgccggacctggccttctgcgtggacgccatgatgcgtgagctgggcctgccggagcgtggcgaggccgcggttcgccagtgggtgggcaacggcgtggagcgcctggtgcagcgggcgctgatcaacgccgtggacggcgatccggagccgtcggagttccagcgcgccctcccggtgttcatgcgcctgtacaaggacaacacctccgggcgcagctgcctgtatccgggggtgcgtgaggggctcgactatctcaaacgcaccggcctgcgcctggcctgcgtcaccaacaaggccgagcagttcaccctgccgctgctgcgggacatgggcatcctgggcgatttcgagctggtggtcagcggcgataccctgccggtgaaaaagcccgatcccgcgccgctcctgcatgccgcagagaagctgggtgtcacgcctgccgagtccctcatggtgggtgattccagaagcgacgtgaaggccgcccgggccgccggtttccccatcgtgtgcgtgagctacggctacaaccacggcgaggacatccgcaactacagccctgacgcggtaatcgaccgcctggaccagatccaggggctgctggaagacgcggcatga

SEQ ID NO: 157691 - protein, 226 aa, Thioalkalivibrio sp. HL-EbGR7
MPIARPRMVLIDLDGTLVDSVPDLAFCVDAMMRELGLPERGEAAVRQWVGNGVERLVQRALINAVDGDPEPSEFQRALPVFMRLYKDNTSGRSCLYPGVREGLDYLKRTGLRLACVTNKAEQFTLPLLRDMGILGDFELVVSGDTLPVKKPDPAPLLHAAEKLGVTPAESLMVGDSRSDVKAARAAGFPIVCVSYGYNHGEDIRNYSPDAVIDRLDQIQGLLEDAA

SEQ ID NO: 157692 - DNA, 762 bp, Enterobacter cancerogenus ATCC 35316
  CDS (1)..(762): transl_table=11
atggataaattgcaggcaacccggggtgtagcatttgacctcgacggcacgctggtcgacagcgcgccgggcttaagcagcgcggttgatcgggcgctgtatgcccttgaattacccgttgcgggcgaagatcgcgttgtgacgtggattggcaacggcgcggacgtgctgatggaacgcgccctgacctgggcgcgccaggagcgtgcgtcacagcgttccgcacagggtaaaccgagcgtcgatcacactgatattccgcaggaagagcagcagcgtattctgcgcaaactgttcgatcgtttctacgaagagaccgtcgaagagggcagcttcctgttcccggacgtcgcggagacgctgagtgttctgcatgctaaaggcattccgctggggctggtaaccaacaagcctacgccgtttgtcgcacctctgcttgaggcgctggatatcgcgaagtatttctcggtaattgtcggcggcgatgacgtgcagaacaaaaaaccgcatccggaaccgcttttgctggtggcaggaaaattatccttaacacctgcggagctactctttgtcggtgattcgcgcaatgatattctggccgccaaagcggcaggctgtccgtgcgtcggattaacctatggctacaactacggtgaggcgattacgctgagtgagccggacgttgtattcgatcgtttcaaagatttattgcccgcactcgggctttcgcacagtgaacatcaggaattgaaaaatgactaa

SEQ ID NO: 157693 - protein, 253 aa, Enterobacter cancerogenus ATCC 35316
MDKLQATRGVAFDLDGTLVDSAPGLSSAVDRALYALELPVAGEDRVVTWIGNGADVLMERALTWARQERASQRSAQGKPSVDHTDIPQEEQQRILRKLFDRFYEETVEEGSFLFPDVAETLSVLHAKGIPLGLVTNKPTPFVAPLLEALDIAKYFSVIVGGDDVQNKKPHPEPLLLVAGKLSLTPAELLFVGDSRNDILAAKAAGCPCVGLTYGYNYGEAITLSEPDVVFDRFKDLLPALGLSHSEHQELKND

SEQ ID NO: 157694 - DNA, 750 bp, Vesicomyosocius okutanii subsp. Calyptogena okutanii (strain HA)
  CDS (1)..(750)
ttgcataacgaatattataaagtattaatatactgtgtattttaccaaaatagtatttgtttaaaaaataaaaggacgtcaatgaaaacatttaatccaaaattaattatgattgatttagatgggaccttggtggatagtgttccagatttagcctattgtattgatgaattaatgaaagcaatgaataggacgccatggggtgagtttaaagttcgtgattgggttgggaatggtgtactaaaattagtagaaaggtcattaactggtgaacttgaggcaagtgttaataaacaagattttgacaaagcttattcaatttttttggaattgtatagcattaacacttccgtgcgttcatgtttatatgacggtgtaaaagaaggtttggattatctaaaacgacaaggttatttgttaggctgtgtgacgaataaagacgagcaatttaccttgccaattttaaaagatttggatatttttaattattttggattggtaatttcgggtgatactttagtaaagaaaaaaccagatccattgccattattacacagcgctgaattttttaatattcctccacaagattgcttaatgcttggtgattcaattagtgatgtaattgcttcacgtgttgctggttttgagattatttgtatgtcgtatggatataatcatggtaaggatatccaagatgtcaatccagatttagttattgattcaatgattgaacttaaagattatttataa

SEQ ID NO: 157695 - protein, 249 aa, Vesicomyosocius okutanii subsp. Calyptogena okutanii (strain HA)
MHNEYYKVLIYCVFYQNSICLKNKRTSMKTFNPKLIMIDLDGTLVDSVPDLAYCIDELMKAMNRTPWGEFKVRDWVGNGVLKLVERSLTGELEASVNKQDFDKAYSIFLELYSINTSVRSCLYDGVKEGLDYLKRQGYLLGCVTNKDEQFTLPILKDLDIFNYFGLVISGDTLVKKKPDPLPLLHSAEFFNIPPQDCLMLGDSISDVIASRVAGFEIICMSYGYNHGKDIQDVNPDLVIDSMIELKDYL

SEQ ID NO: 157696 - DNA, 699 bp, Penicillium chrysogenum
  strain ATCC 28089 / DSM 1075 / Wisconsin 54-1255
  CDS (1)..(699)
atgatagccctcgcaatcttcgacttcgacggtactctctttgatacacatgaatccatctcccaaaccataagactcaccttcgagaccctcctccccacccacacccctccccaacccaaaatccaccgtctcatcgccagcggagccggcctagcagacacattcaaagccctacatccttcccccgctgaattcactccgaccgccgagaacgagtggattgaaaaataccgcgctctctatgccacccatggccaactactcatcaaagccttccccggcgccaaggatctcctcaccgaactaaacgcccacaagatccccatcgcgattgtgagtaataagggtgtagctgcagtgaaaacggccttggagcggaatggtatggatggctgcgtgcctgaagatttgatcatcggtgataagacacccggggcgaagcgaaagccggatcctgctagctttgtggatgttctgattcctgttctgagagagaagtatggaatggacgagattgattcggggagtgtgttggtggtgggtgatacggtggcggatgttcagttcgcaaggaatatcaagagtagggtctgctggtgtcggtatgggtacggagatcagaaggcttgtgaggaattgaacccggattatgtggtggattctctgggggaggttgtggggattgtgaggacctaa

SEQ ID NO: 157697 - protein, 232 aa, Penicillium chrysogenum
  strain ATCC 28089 / DSM 1075 / Wisconsin 54-1255
MIALAIFDFDGTLFDTHESISQTIRLTFETLLPTHTPPQPKIHRLIASGAGLADTFKALHPSPAEFTPTAENEWIEKYRALYATHGQLLIKAFPGAKDLLTELNAHKIPIAIVSNKGVAAVKTALERNGMDGCVPEDLIIGDKTPGAKRKPDPASFVDVLIPVLREKYGMDEIDSGSVLVVGDTVADVQFARNIKSRVCWCRYGYGDQKACEELNPDYVVDSLGEVVGIVRT

SEQ ID NO: 157698 - DNA, 687 bp, Providencia rustigianii DSM 4541
  CDS (1)..(687): transl_table=11
atgacacacgcagttttagaaagtattaaggcaattgcttttgatttagatggcacactggttgatagcgcaggtggcttagccgacgctatcgataaaaccctagaagagttgaatcttccaccagcaggtaaagaacgtgtctccatttgggtcggtaacggtgctgatattttagttaaacgcgcattggaatgggcgggcgttacactaactccggaattgcataaaaatgcgcgtgagaattttgataagcattatgcgacgacagttaatactggcagtcagctattccctgaagttaaagagaccctagataccttggcaaaacataacctgccaatggcaatcgttaccaataagccaacgccatttgttgcgccattattagaaaagctaggcattgatagctacttttctttagtgcttggcggtgatgatgtgaaaaaaaccaagccgcacccagcgccgttgtatttaaccatgggcaagtttggattacgcaaagaagaattgctttttgtcggtgattcccgtaatgatattatcgcagcccacagtgctggctgcccaagcgtagggttaacctacggttacaactacggtgagtcaatcgcaattactgagccagactatgtgttaactcatttttctgagttactctccgttattgatttatcgaaataa

SEQ ID NO: 157699 - protein, 228 aa, Providencia rustigianii DSM 4541
MTHAVLESIKAIAFDLDGTLVDSAGGLADAIDKTLEELNLPPAGKERVSIWVGNGADILVKRALEWAGVTLTPELHKNARENFDKHYATTVNTGSQLFPEVKETLDTLAKHNLPMAIVTNKPTPFVAPLLEKLGIDSYFSLVLGGDDVKKTKPHPAPLYLTMGKFGLRKEELLFVGDSRNDIIAAHSAGCPSVGLTYGYNYGESIAITEPDYVLTHFSELLSVIDLSK

SEQ ID NO: 157700 - DNA, 657 bp, Roseobacter sp. GAI101
  CDS (1)..(657): transl_table=11
atgacatatcccaaagcgatcatctttgatctggacggcaccctgatccacagcgcgcctgatcttcacgccgccgcgaatgcgaccctcacgtccctggggcgcgaggcgctggatttgccgaccgtcatctcgttcatcgggaacggggtcgaaaagctggttgaacgcagcctggacgccacaggcggctacgacgcggcgcaaaggcaaacggcccttggtctgttcatggacagctacaatcaggacatgacgacactgacccgtccttaccccggcgtgatggcggcacttgcggcgtttcaggatgccggtgttccgctgggcatctgcaccaacaaaccaaccggaccggcgcgcgaaatctgtgaacggctggatctgacgccgtactttcaggtcatcgcaggggcagaggacgggcaggccaaaaagcccgatccggcacctttgctggcctgtatcgacgacctgcgcgccaagccgtctgagactttgtatgtcggcgacagcacgatcgactattttacggcccgcaacgcggatgtcccgtttcgattgtacacaaatggctacttgaacgcgcctttgccggacctgccagaggcaagccggttcgacgactggacggcccacggcattccgaccggctga

SEQ ID NO: 157701 - protein, 218 aa, Roseobacter sp. GAI101
MTYPKAIIFDLDGTLIHSAPDLHAAANATLTSLGREALDLPTVISFIGNGVEKLVERSLDATGGYDAAQRQTALGLFMDSYNQDMTTLTRPYPGVMAALAAFQDAGVPLGICTNKPTGPAREICERLDLTPYFQVIAGAEDGQAKKPDPAPLLACIDDLRAKPSETLYVGDSTIDYFTARNADVPFRLYTNGYLNAPLPDLPEASRFDDWTAHGIPTG

SEQ ID NO: 157702 - DNA, 732 bp, Yersinia pestis bv. Antiqua (strain Nepal516)
  CDS (1)..(732): transl_table=11
atgccatgcgcaatgaactggcgatggcggctaatggttaagtttaaggcgattcgtggtgttgcattcgatctggatggcacattagtcgacagcgcgcccggtctggcccgtgcaattgatatggcgttggcgcatcaggggttgcctgccgctggtgaagcgttagtctccacttggattggtaatggcgcagatgtcttagtcgagcgcgcgttgcattgggcagggcgtgaacataatgctcagcttgtggcacagacccgcgagctgtttgatcactattatgccaaaaccgttgagcaggggagccagttattcccgcaagtgaaagccactttagctcaattggctgccaatggtttgccaataggcctcattaccaataagccaacaccgtttgttgcccctttactaacgtcattggggatctcagactatttctcagtcatcattgggggcgatgatgtggtggtgaagaaaccgcatccggccccgttgtatttattgctgggaaaacttggcttacatgcccgtgaaatgctgtttgtcggtgactcgcgtaatgacattatggccgcacaggcggcgggttgcccttgtattgggctgacctatggatataactacggtgaagcgattgccaccagtcatccagactgcgtgctggcgcattttgccgacctgttgcccgccattgggctaccatctttaaaagatcaggaagtataa

SEQ ID NO: 157703 - protein, 243 aa, Yersinia pestis bv. Antiqua (strain Nepal516)
MPCAMNWRWRLMVKFKAIRGVAFDLDGTLVDSAPGLARAIDMALAHQGLPAAGEALVSTWIGNGADVLVERALHWAGREHNAQLVAQTRELFDHYYAKTVEQGSQLFPQVKATLAQLAANGLPIGLITNKPTPFVAPLLTSLGISDYFSVIIGGDDVVVKKPHPAPLYLLLGKLGLHAREMLFVGDSRNDIMAAQAAGCPCIGLTYGYNYGEAIATSHPDCVLAHFADLLPAIGLPSLKDQEV

SEQ ID NO: 157704 - DNA, 762 bp, Klebsiella aerogenes
  CDS (1)..(762): transl_table=11
atggataaattacaggcgatccgcggcatcgcatttgatctcgacggcacgctggtggacagcgcgccgggtctaacctcggcggttgataacgccctgtacgccctggagctgccggtggcgggagaagaacgcgttatcacctggatcggtaacggcgccgatgtcctgatggagcgggcgctgacctgggctcgtcaggagcgagcaacgttacgtgcggcgatgggtaagccttccgtcgacgatcatgatattccgcaagacgagcagctgcgcattttgcgtaaactgtttgaccgctattacgccgaagcggcggaagagggcagtttcctgttcccggcggtggccgatacgctcggcgcgctgcatgccaaaggcctgccgctggcgctgattaccaataagccgacgccgtttgtcgccccgctgttggacgcgctcgatattgcgaaatattttaccgtggtgattggcggcgatgacgtgcagaataaaaagccgcatccggaaccgctgctgctggtggcggaaaagctctctctggctccagccgagctgctgtttgtcggcgattcgcgcaatgatattcaggcggccaaagcggcaggctgctgctctgttggtctgacctacggttataactatggtgaaccgcttgcgctgagcgagccggactatctcttcgaccagtttaacgaactcttacccgctctcgggttaccgcacagtgaaactcaggaattgaaacatgactaa

SEQ ID NO: 157705 - protein, 253 aa, Klebsiella aerogenes
MDKLQAIRGIAFDLDGTLVDSAPGLTSAVDNALYALELPVAGEERVITWIGNGADVLMERALTWARQERATLRAAMGKPSVDDHDIPQDEQLRILRKLFDRYYAEAAEEGSFLFPAVADTLGALHAKGLPLALITNKPTPFVAPLLDALDIAKYFTVVIGGDDVQNKKPHPEPLLLVAEKLSLAPAELLFVGDSRNDIQAAKAAGCCSVGLTYGYNYGEPLALSEPDYLFDQFNELLPALGLPHSETQELKHD

SEQ ID NO: 157706 - DNA, 702 bp, Vibrio vulnificus
  CDS (16)..(702): transl_table=11
gtgagccaagtagtgatgactcaacaagagataaaattaatcgccttcgaccttgatggcaccttgctagacagcgtgccagatttggccgttgcggcggatcaagcgacacgtgcagtcggttttccgggagtaaccgagttgcaagttcgtgattacgtcggtaatggcgcagacattctgattggtcgtgccttgagccaaagcttaaccatcaacccagagttgagtgatgaattgagagctcaggcgcgtgagctgtttgatgatttctatcagcaaactggtcataagcttagccacctctacccaacggtgaaagaaacgctgaaagagctgcaccaagcgggcttcaccttggcgttggtgaccaacaaacccagcaagtttgttccggatgtgttgcagcagcacggcatcgctgattactttgtcgatgtgctcggtggtgattcattcccagagaagaaacccaacccaatcgcactcaattggctcatggaaaaacatcagattcagccaaccgagatgttgatggtgggcgactctaagaacgatattctggcagcaaaaaatgctggttgtgcctcgtttggtttgacctatggctacaaccatggcgaacctattgccgcctctgagccggatttcgttgccgatagcttggcgcaattgcttgatgtggtgctcgtttctgcttga

SEQ ID NO: 157707 - protein, 228 aa, Vibrio vulnificus
MTQQEIKLIAFDLDGTLLDSVPDLAVAADQATRAVGFPGVTELQVRDYVGNGADILIGRALSQSLTINPELSDELRAQARELFDDFYQQTGHKLSHLYPTVKETLKELHQAGFTLALVTNKPSKFVPDVLQQHGIADYFVDVLGGDSFPEKKPNPIALNWLMEKHQIQPTEMLMVGDSKNDILAAKNAGCASFGLTYGYNHGEPIAASEPDFVADSLAQLLDVVLVSA

SEQ ID NO: 157708 - DNA, 702 bp, Vibrio vulnificus (strain YJ016)
  CDS (16)..(702): transl_table=11
gtgagccaagtagtgatgactcaacaagagataaaattaatcgccttcgatcttgatggcaccttgctagatagcgtgccagatttggccgttgcggcggatcaagcgacacgtgcggtcggctttccgggagtaaccgagctgcaagttcgcgattacgtcggtaatggcgcagacattctgattggtcgtgccttgagccaaagcttaaccatcaacccagagttgagtgatgaattgagagctcaggcgcgtgagctgtttgatgatttctatcagcaaactggccataagcttagccacctttacccaacggtgaaagaaacgctgaaagcgctgcaccaagcgggcttcaccttggcgttggtgaccaacaaacccagcaagtttgttccggatgtgttgcagcagcacggcatcgccgactactttgtcgatgtgctcggtggtgattcattcccagagaagaagcccaacccaatcgcactcaattggctcatggaaaaacatcagattcagccaaccgagatgttgatggtgggcgactctaagaacgatattctggctgcaaaaaatgctggttgtgcctcgtttggtttgacctatggctacaatcatggcgaacctatttctgcctctgagccggatttcgttgccgatagcttggcgcaattgcttgatgtggtgctcgtttctgcttga

SEQ ID NO: 157709 - protein, 228 aa, Vibrio vulnificus (strain YJ016)
MTQQEIKLIAFDLDGTLLDSVPDLAVAADQATRAVGFPGVTELQVRDYVGNGADILIGRALSQSLTINPELSDELRAQARELFDDFYQQTGHKLSHLYPTVKETLKALHQAGFTLALVTNKPSKFVPDVLQQHGIADYFVDVLGGDSFPEKKPNPIALNWLMEKHQIQPTEMLMVGDSKNDILAAKNAGCASFGLTYGYNHGEPISASEPDFVADSLAQLLDVVLVSA

SEQ ID NO: 157710 - DNA, 25 bp, Artificial sequence
  primer
atgaataagtttgaagatattcgcg

SEQ ID NO: 157711 - DNA, 27 bp, Artificial sequence
  primer
ttagtcatttttcgattcctgattttc

SEQ ID NO: 157712 - protein, 247 aa, Artificial sequence
  consensus sequence
  Variant (8)..(8): Xaa in position 8 is any amino acid
  Variant (11)..(11): Xaa in position 11 is any amino acid
  Variant (13)..(13): Xaa in position 13 is any amino acid
  Variant (15)..(16): Xaa in position 15 to 16 is any amino acid
  Variant (18)..(37): Xaa in position 18 to 37 is any amino acid
  Variant (38)..(47): Xaa in position 38 to 47 is any or no amino acid
  Variant (49)..(49): Xaa in position 49 is any amino acid
  Variant (51)..(53): Xaa in position 51 to 53 is any amino acid
  Variant (54)..(54): Xaa in position 54 is any or no amino acid
  Variant (56)..(57): Xaa in position 56 to 57 is any amino acid
  Variant (61)..(71): Xaa in position 61 to 71 is any amino acid
  Variant (72)..(97): Xaa in position 72 to 97 is any or no amino acid
  Variant (99)..(101): Xaa in position 99 to 101 is any amino acid
  Variant (103)..(112): Xaa in position 103 to 112 is any amino acid
  Variant (113)..(113): Xaa in position 113 is any or no amino acid
  Variant (115)..(115): Xaa in position 115 is any amino acid
  Variant (117)..(119): Xaa in position 117 to 119 is any amino acid
  Variant (121)..(122): Xaa in position 121 to 122 is any amino acid
  Variant (124)..(126): Xaa in position 124 to 126 is any amino acid
  Variant (127)..(130): Xaa in position 127 to 130 is any or no amino acid
  Variant (132)..(137): Xaa in position 132 to 137 is any amino acid
  Variant (141)..(141): Xaa in position 141 is any amino acid
  Variant (143)..(149): Xaa in position 143 to 149 is any amino acid
  Variant (151)..(157): Xaa in position 151 to 157 is any amino acid
  Variant (158)..(158): Xaa in position 158 is any or no amino acid
  Variant (160)..(163): Xaa in position 160 to 163 is any amino acid
  Variant (164)..(165): Xaa in position 164 to 165 is any or no amino acid
  Variant (169)..(173): Xaa in position 169 to 173 is any amino acid
  Variant (174)..(175): Xaa in position 174 to 175 is any or no amino acid
  Variant (178)..(178): Xaa in position 178 is any amino acid
  Variant (180)..(181): Xaa in position 180 to 181 is any amino acid
  Variant (183)..(196): Xaa in position 183 to 196 is any amino acid
  Variant (197)..(205): Xaa in position 197 to 205 is any or no amino acid
  Variant (207)..(207): Xaa in position 207 is any amino acid
  Variant (212)..(213): Xaa in position 212 to 213 is any amino acid
  Variant (215)..(216): Xaa in position 215 to 216 is any amino acid
  Variant (219)..(220): Xaa in position 219 to 220 is any amino acid
  Variant (223)..(229): Xaa in position 223 to 229 is any amino acid
  Variant (234)..(241): Xaa in position 234 to 241 is any amino acid
  Variant (242)..(245): Xaa in position 242 to 245 is any or no amino acid
FDLDGTLXDSXPXLXXAXXXXXXXXXXXXXXXXXXXXXXXXXXXXXXGXGXXXXLXXRALXXXXXXXXXXXXXXXXXXXXXXXXXXXXXXXXXXXXXFXXXYXXXXXXXXXXXPXVXXXLXXLXXXXXXXGXXXXXXTNKXPXXXXXXXLXXXXXXXXFXXXXXXGGDXXXXXXXKPXPXXLXXXXXXXXXXXXXXXXXXXXXXXLXVGDSXXDXXAAXXAGXXXXXXXYGYNXXXXXXXXXXXXPD

SEQ ID NO: 157713 - protein, 13 aa, Artificial sequence
  protein pattern
  Variant (4)..(4): Xaa in position 4 is any amino acid
  Variant (5)..(5): Xaa in position 5 is Ala, Asn, Ser, Thr or Val
  Variant (7)..(8): Xaa in position 7 to 8 is any amino acid
  Variant (11)..(12): Xaa in position 11 to 12 is any amino acid
  Variant (13)..(13): Xaa in position 13 is Ala or Thr
GDSXXDXXAAXXX

SEQ ID NO: 157714 - protein, 21 aa, Artificial sequence
  protein pattern
  Variant (4)..(4): Xaa in position 4 is Ala or Pro
  Variant (5)..(6): Xaa in position 5 to 6 is any amino acid
  Variant (7)..(7): Xaa in position 7 is Phe or His
  Variant (8)..(10): Xaa in position 8 to 10 is any amino acid
  Variant (11)..(11): Xaa in position 11 is Ile, Leu, Met or Val
  Variant (13)..(20): Xaa in position 13 to 20 is any amino acid
TNKXXXXXXXXLXXXXXXXXF

SEQ ID NO: 157715 - protein, 19 aa, Artificial sequence
  protein pattern
  Variant (8)..(10): Xaa in position 8 to 10 is any amino acid
  Variant (11)..(16): Xaa in position 11 to 16 is any or no amino acid
  Variant (18)..(18): Xaa in position 18 is Ala, Ile, Leu, Pro or Val
  Variant (19)..(19): Xaa in position 19 is Ala, Asp, Gly, Asn, Ser or Val
FDLDGTLXXXXXXXXXAXX

SEQ ID NO: 157716 - protein, 14 aa, Artificial sequence
  protein pattern
  Variant (2)..(2): Xaa in position 2 is Asp or Gln
  Variant (3)..(3): Xaa in position 3 is Ala, Asp, Ser or Thr
  Variant (4)..(7): Xaa in position 4 to 7 is any amino acid
  Variant (10)..(10): Xaa in position 10 is any amino acid
  Variant (12)..(12): Xaa in position 12 is any amino acid
  Variant (13)..(13): Xaa in position 13 is Ala or Pro
GXXXXXXKPXPXXL

SEQ ID NO: 157717 - DNA, 1725 bp, SACCHAROMYCES CEREVISIAE
  CDS (1)..(1725)
atgtcggaaggaagaacgtttctgtcacagttgaatgtcttcaacaaggagaactatcaattttcttcttctactacaaaaaaggaagtaagtaactcgacagtggatgctgacaacggtgcctccgattttgaggcaggccagcaatttgctacagaattggaccaaggtgaaaagcagttaggtattttgtcgtgtattgggcttatctgtaatagaatgcttggtaccggtgttttcgccgtttcctcgaccatttacacactatgtgggtctgtggggcttgcattaattatgtgggcagttggcgccattattgccatttctgggttatatgtatacatggaattcggtacggctataccgaaaaatggtggtgaaaaaaactacctggaggctattttcaggaaaccaaaattcttcattacctgtatgtatgctgcgtatattttcttcctaggttgggctgctggtaattccatcaatacagctattatgtttttaactgctgctgatactgaagtgaccaaatggaatcaaagaggtattggtgtggccgtcgttttttttgcattcctaattaattctctgaatgtcaagattggtctatatttgcaaaacattttaggtattttcaagattggtattgtcctcttcatttctattaccggttgggttgcccttggcggtggtctcaaagatggttatcaatctcacaactttcgtaatgcttttgaaggtactgaaaccgccactgcttatggtattgttaacgccttatatagtgttatttggtcgtttgtcggttactccaatgttaactatgcacttggtgaagttaagaaccctgtgagaactttgaagattgctggtcctacatcgatggtcttcttggctataatctacatttttgtgaacattgcttacttcgctgtggttccaaaagataagttaatttcttcaaaattgattttagctgctgacttcttcgatattgtgtttggcggccaagccaagagagcagcagccgcactggtcgggttgagtgccttaggaaatgttctttctgtcattttttctcagggtagaattattcaacaactaggacgtgaaggtgtgttgcccttttctaatttctttgcctcttctaagccattcaactccccaatggttggtttgtttcaacattttattgtttgtacagtaaccattttagccccacctccaggtgatgcatatttgctagtccaaaatttaatttcctacccaatgaatattattaattttgccattagcgcgggtttgctttggatatactggcaacgtagacaaggtaaaattgaatggaacccaccaattaaggccggtgtttttgttacgggatttttcacattatccaatttatacctgattattgctccttacgttccaccttcaaatggcgagtcggtgtattcaagcatgccatactggatccactgtgtaattgcttggggtattttcttctttggtggtgtttactacgttgtttgggcccaattattgccaagatggggccactacaaattggtttccaaggatgtgcttggtgaagatgggttctggagagtcaaaattgccaaagtttatgatgacactattggcgatgtcgatacacaagaagacggcgttattgaaacgaatataatcgaacattacaaaagtgaacaagaaaaatcgctgtaa

SEQ ID NO: 157718 - protein, 574 aa, SACCHAROMYCES CEREVISIAE
MSEGRTFLSQLNVFNKENYQFSSSTTKKEVSNSTVDADNGASDFEAGQQFATELDQGEKQLGILSCIGLICNRMLGTGVFAVSSTIYTLCGSVGLALIMWAVGAIIAISGLYVYMEFGTAIPKNGGEKNYLEAIFRKPKFFITCMYAAYIFFLGWAAGNSINTAIMFLTAADTEVTKWNQRGIGVAVVFFAFLINSLNVKIGLYLQNILGIFKIGIVLFISITGWVALGGGLKDGYQSHNFRNAFEGTETATAYGIVNALYSVIWSFVGYSNVNYALGEVKNPVRTLKIAGPTSMVFLAIIYIFVNIAYFAVVPKDKLISSKLILAADFFDIVFGGQAKRAAAALVGLSALGNVLSVIFSQGRIIQQLGREGVLPFSNFFASSKPFNSPMVGLFQHFIVCTVTILAPPPGDAYLLVQNLISYPMNIINFAISAGLLWIYWQRRQGKIEWNPPIKAGVFVTGFFTLSNLYLIIAPYVPPSNGESVYSSMPYWIHCVIAWGIFFFGGVYYVVWAQLLPRWGHYKLVSKDVLGEDGFWRVKIAKVYDDTIGDVDTQEDGVIETNIIEHYKSEQEKSL

SEQ ID NO: 157719 - DNA, 1731 bp, Saccharomyces pastorianus
  CDS (1)..(1731)
atggccgaaggaagaacttttctttctcagttgaatgtcttcaacaaggaaaactaccagtttccctcttcttccacaaccaaaaagaaatcgagcgccacaacggtagatgttgacaacgatgcctccgattttgaagcaggccaacagttcgctacagagttggaccaaggtgaaaagcaactaggtgttctgtcatgtatcgggcttatctgcaacagaatgcttggtacaggtgttttcgccgtgtcctcgacaatttacacattatgtgggtctgtgggacttgctttgatcatgtgggccgtcggggccattattgccatttctggtttatacgtctacatggagttcggtacagctataccgaagaatggtggtgaaaagaattacctggaagccatcttcagaaaacccaaatttttcattacctgtatgtacgctgcctacatttttttcctaggttgggctgctggtaactccataaatacagctgtcatgtttttaactgcggctgatgcggaaatcacgaaatggaaccaaagaggtattggtgtggctgtcgttttctttgcgtttttgataaattctttgaacgttaaaattggtttatatctacaaaacattttgggtgttttcaaagttggtattgtccttttcatctccattaccggttgggttgcccttggtggtgggctaaaagacggttaccaatctcacaatttccgtaacgcctttgaaggtaccgaaactgccactgcttacggtattgttaacgccttgtatagtgttatttggtcatttgttggttactcgaatgttaattacgcacttggtgaagttaagaaccctgtgagaactttgaagatcgcaggtcctacatctatggtttttttggcaatcgtttacatttttgtcaatattgcctactttgctgtggtgccaaaagaaaagctaatatcttccaagttagtcttagcagctgatttctttgatatcgtttttggtggccaagccaaaagagctgctgccgcattggtcgggttgagcgccttgggtaatgttctttctgttattttttctcaaggtagaatcattcaacagttgggtcgtgaaggtatcctgccgttttccaacttttttgcctcttccaaaccattcaactccccaatggttggtttgtttcaacattttgttgtctgtacaatcaccattatagctccgcctccaggtgatgcgtatctactagttcaaaatttgatttcttacccaatgaacattatcaatttcgccatcagtgctggtttactatggatatattggcaacgtagacaaggtaagattgaatggaacccaccaatcaaggccggcgtttttgtcacagggtttttcgcattatctaatctatatctgatcattgcaccatatgttcctccatcaaacggcgagtccgtttattcaagcatgccatactggatccactgtgtgatcgcatggggtatcttcctctttggtggtgtttactacgttgtatgggcacaattattaccaaaatggggccactacaaattggtcacgaaggatgtgcttggtgaagacggattttggagagtcaagattgccaaagttcatgatactaatgacagcgatgatatggatacacaagaagacggtattgtcgaaactgatataatcgaacattataaaagtgaagaagaaaaacaactatag

SEQ ID NO: 157720 - protein, 576 aa, Saccharomyces pastorianus
MAEGRTFLSQLNVFNKENYQFPSSSTTKKKSSATTVDVDNDASDFEAGQQFATELDQGEKQLGVLSCIGLICNRMLGTGVFAVSSTIYTLCGSVGLALIMWAVGAIIAISGLYVYMEFGTAIPKNGGEKNYLEAIFRKPKFFITCMYAAYIFFLGWAAGNSINTAVMFLTAADAEITKWNQRGIGVAVVFFAFLINSLNVKIGLYLQNILGVFKVGIVLFISITGWVALGGGLKDGYQSHNFRNAFEGTETATAYGIVNALYSVIWSFVGYSNVNYALGEVKNPVRTLKIAGPTSMVFLAIVYIFVNIAYFAVVPKEKLISSKLVLAADFFDIVFGGQAKRAAAALVGLSALGNVLSVIFSQGRIIQQLGREGILPFSNFFASSKPFNSPMVGLFQHFVVCTITIIAPPPGDAYLLVQNLISYPMNIINFAISAGLLWIYWQRRQGKIEWNPPIKAGVFVTGFFALSNLYLIIAPYVPPSNGESVYSSMPYWIHCVIAWGIFLFGGVYYVVWAQLLPKWGHYKLVTKDVLGEDGFWRVKIAKVHDTNDSDDMDTQEDGIVETDIIEHYKSEEEKQL

SEQ ID NO: 157721 - DNA, 1686 bp, Ashbya gossypii ATCC 10895
  CDS (1)..(1686)
atgtcccaaggtacaattttctcgcagctgaaaatacgaaagaagcgccaagaagtggccttctttgaatccaacgccgacgccaatgatgtcgaggcgggcgaacattttataacagagctcgataagggcgataagcggctcggcctgttttcttcgatcggcttgatatgcaatagaatgctcgggacaggtatctttgtcgttcccgcgaagatcttccagttgactggctcagtatactttgcgctagggttatgggtactaggagctttaattgctctagcaggtctttatgtttacatggaatttggaactgcaataccgcggaacggtggcgagaagaactaccttgagttcatcttcaagaaaccgaaattcttcattacgtcaatgtactcagcatatgtcatctttttaggctgggccgcaggtaactctgtgatggcagctgcaatgttccttgatgctggaaaggtcgaggcaacacgttggcgtgaacgcggtcttggagttgcggtcattttcttctgcttccttgtcaactctctcagtgtcaaagctgggttgtacttccagaacattttgggtgtgttcaagattggaactatcattttcattgctattacaggtctcgttgctcttggaggtcatatcgacggcgctcccggcacggagaacttccgtcacagtccgtcagacctatccccctctgcatacaccatcgtcaatgcattatatcaagttatttggtcgtttgttgggtactctaatgtgaactacgctcttggggaggtgaagaatccagtcagaacgctaaagattgcaggtcctagttcattggctgtgcttggtacgctatacctcctcgtcaacgttgcatttttcgcagtcgtacctatggaaatactaaaggacgcgggtatgaacttaacgcctaagttcttcgacattgcatttggcgacaaggctagaagggcgtccgccatctttattggactgagtgcattgggaaacgtgtgctcagtgatcttctcgcagggtagaattgtccagcaattaggaagagaaggtgtgttgcctttcaccagcttcttcgcgtcctcaaagccattcaattcgccaatggctggccttttccagcacatgattatctgtgccatcacgatacttgctcctcctccaggagatgcatacgactttgttttgaacttgatttcctatccaatgaatatcatcaactttatcctcgcatgcggtttgatctggatctactggcagcggcgccagagcaagctcgagtggaatcctccgatcagagctggctactttgtcacttcattcttcctgattgcgaacttgtatttgatcgtggcgccttacgtgccaccgccaagcgggtcctccgtctacaagtcgcttccctactacattcactgtgtcgttacgtgggctatttttgcagttggcagcatctactggctaatatggtcgcgcttgctacctaagtggaacaactacgaactagtccactccgaagtgctaggcgaagacggcttctggagaaataagatagtcaagaaatacgctggggaagacagcgttagcacccctgatgggggaagtgactccaccctgaaggagggtttctcggggattggtgtcaagcaaagtattgtacaatga

SEQ ID NO: 157722 - protein, 561 aa, Ashbya gossypii ATCC 10895
MSQGTIFSQLKIRKKRQEVAFFESNADANDVEAGEHFITELDKGDKRLGLFSSIGLICNRMLGTGIFVVPAKIFQLTGSVYFALGLWVLGALIALAGLYVYMEFGTAIPRNGGEKNYLEFIFKKPKFFITSMYSAYVIFLGWAAGNSVMAAAMFLDAGKVEATRWRERGLGVAVIFFCFLVNSLSVKAGLYFQNILGVFKIGTIIFIAITGLVALGGHIDGAPGTENFRHSPSDLSPSAYTIVNALYQVIWSFVGYSNVNYALGEVKNPVRTLKIAGPSSLAVLGTLYLLVNVAFFAVVPMEILKDAGMNLTPKFFDIAFGDKARRASAIFIGLSALGNVCSVIFSQGRIVQQLGREGVLPFTSFFASSKPFNSPMAGLFQHMIICAITILAPPPGDAYDFVLNLISYPMNIINFILACGLIWIYWQRRQSKLEWNPPIRAGYFVTSFFLIANLYLIVAPYVPPPSGSSVYKSLPYYIHCVVTWAIFAVGSIYWLIWSRLLPKWNNYELVHSEVLGEDGFWRNKIVKKYAGEDSVSTPDGGSDSTLKEGFSGIGVKQSIVQ

SEQ ID NO: 157723 - DNA, 1653 bp, Aspergillus terreus NIH2624
  CDS (1)..(1653)
atgtccgattcatccctggagaacggctctcacaaggccatcgtgcccgacgcgaaggccgtcggagatgctcctcggcgagcagatggcgtgtctcagctgtacgagggcaacgtcttcgatgctaccccggaggaccgccgtcagatcggcgtcgtgagcgcctccttcctgatcttcaaccgtatcattggaacgggtatcttcgcgaccccgagtacgattctgtctttgtctggtagtgtcgggctgtcgttgttcatgtgggtggcgggtacggccattgctatggccggtaccgccgtctatctggaatggggtactgcgattcctaagaacggtggcgagaagaattacctcgaatatgtcttcaagaaacccaagttcctggccacggccatgtacgccgcctacgctgtgttgctgggctgggccgcgagcaacagcgtggtgttcggcgagtacattctgaacgctgcggacgtggaggttggccgctggaaccagcgtggcatcgggttggcgtgtattactgccgcctttctgatccatgccctcgctgtgaaatggggcctgcgtctccagaaccttctcggtgtggtcaagctggtcatcatcgtcttcgtcgttgtgtgcgggtgggtggcgctggcgggccacatgcacatcgaaaaccctccccataactttcggaacgcctttgagggcacgacgggcagcggctatggaattgtcatggctttgtacaacgttatctggtcgtttatcggctactccaacgccaactatgccctgagcgaaaccaagaaccctacgcgcactctgaagattgctgcgcctattgccattggcgcggtgggcatcctctatatgctctgcaacatcgcatactttgcggccgtgccgaaggagcagttcctttcgtcgggccagactgtcgcggccactttcttcggaaacatgtttggccagcgtgcggagaaggtcatgtcggttttcgtggcgctgtctgcttttggcaacgttttgtcggtgatcttctcccagggtcgcattgtccaggaattgggccgtgagggcgttctgcccttctcgaagatctgggctagcaaccggccattcaactcgccggcggctggtctgttcgagcactgggtcgtgtcgatcatcatcatgttggcgccgcccccgggtgatgcgtacaacttccttgtcaacctgatctcctacccgctttccatcgtcaacgtgttcgtgtccggcggactgatctatatctacctgttcaagtcccgcttcccggactgggccccaggcatccgcgccacgctgccggtgaccatcttcttctgcctgtcgaacatgtacctggtggtggcgccgtacgtgccgccaagcgagggccagagcgtgtacgaggagctgccgtactacctgcactgcgtggttgcgattgggatcttcgcgctgggcgcgctgtactacgtcgtgtgggcggtggtgctgccgcggattggccgatacatgctggtgaaggagacggtggtggacgctgatggctggtcgcgcagcgtgttcaccaagctgccgctgtcgcagttggggtcaccgtccgcagcggcatcggtgtcaacgcctccgcaggacttctaa

SEQ ID NO: 157724 - protein, 550 aa, Aspergillus terreus NIH2624
MSDSSLENGSHKAIVPDAKAVGDAPRRADGVSQLYEGNVFDATPEDRRQIGVVSASFLIFNRIIGTGIFATPSTILSLSGSVGLSLFMWVAGTAIAMAGTAVYLEWGTAIPKNGGEKNYLEYVFKKPKFLATAMYAAYAVLLGWAASNSVVFGEYILNAADVEVGRWNQRGIGLACITAAFLIHALAVKWGLRLQNLLGVVKLVIIVFVVVCGWVALAGHMHIENPPHNFRNAFEGTTGSGYGIVMALYNVIWSFIGYSNANYALSETKNPTRTLKIAAPIAIGAVGILYMLCNIAYFAAVPKEQFLSSGQTVAATFFGNMFGQRAEKVMSVFVALSAFGNVLSVIFSQGRIVQELGREGVLPFSKIWASNRPFNSPAAGLFEHWVVSIIIMLAPPPGDAYNFLVNLISYPLSIVNVFVSGGLIYIYLFKSRFPDWAPGIRATLPVTIFFCLSNMYLVVAPYVPPSEGQSVYEELPYYLHCVVAIGIFALGALYYVVWAVVLPRIGRYMLVKETVVDADGWSRSVFTKLPLSQLGSPSAAASVSTPPQDF

SEQ ID NO: 157725 - DNA, 1614 bp, Coccidioides immitis RS
  CDS (1)..(1614)
atggcgcatgtcgagaacgctgatatcgagcctatctcctctcccgggaacgggagcgacgtgtctactctagcctccgcggatatcccatccaatcggattggaaagagccagttgtcccaggagataagtcctcatgctctggagaaattggacacggcgaggacgtgcgtgtccgatgatattccgggcaatcgaaggcagatcggagtgctcactgcgacgttcttggtgtttaataggataattgggacggggatatttgctaccccgagcactatcctggctttgactgggagcgttggcatgtcgttgaccgtttggttcgttggaatgatcatcgccatggcggcaaccgcgatatacgcttcatatgcgctgttccttggttgggcggcaggaaatagcgttatatttggagaataccttcttcatgcttttggggtacaggtcaatcggtggaatcaacgcggcatcgggttggtctgcatcaccgtcgccttcattatccacgctaccgcagtgaaatgggggctccgtattcaaaacacactgggtgtcttgaaattggttgtcattcttatcattgccgttggcgggctcttggcttgtgccggcttcgtgaatatagacaggcctcgtaacttcgaacatccctggggtgaagggccacccacggtgtatggcatagttatgggcctgtacaatgtcatctggtcatacgttggctattcgaatgcgaattattgcttgagtgagactcgtaatccggttcgaacgttgaaaatagcagcacctattggcgtagcgatggttgggattctgtatttccttgttaatgttgcatattttgctgctgtcccaaaggaagagatgcttctatccgggcgcatcctcgcggcatctttttttcggaacgtttttgggttcaaggccgaacgagcgctatcaacattcgttgctttttgcgcgtttggcaacgtcctggctgttttgttctcccagggccgaatcgtccaagcacttggaagagagggagttctgccgttttcgcggttctgggcgagtaataaaccctttaactctcctgcagctggactattccagcactatatcgtctctgtggttgtcatgctggcgccgccgccaggagatgcttataacttcttgctcaattttcaaagtctcatcggatatccactttcgaccgtgaatgtcctggtctccggtgggcttcttcatatctacttttgtcctgagcgctatcccacctggtctcctggtattcgtgctaccttgccggtgacctttttcttcttcttctccaatgtgtatttggccgtagcaccgttcctgcctccgccaagaagggtgggtaatgtctatgagcgtttgccgtattatactcattgtcttgctgggctcacgatctttgcgcttggcgctttgtactggctcttctgggccaagattcttccttggatgggtgaatatcgacttggcgaggaatccgttgttgggcaagatggctgggcgcgaaagatagtccagcggatccccacggctcccgagctggaagagcaagggcggaggaatgggagcatgtggtcgtag

SEQ ID NO: 157726 - protein, 537 aa, Coccidioides immitis RS
MAHVENADIEPISSPGNGSDVSTLASADIPSNRIGKSQLSQEISPHALEKLDTARTCVSDDIPGNRRQIGVLTATFLVFNRIIGTGIFATPSTILALTGSVGMSLTVWFVGMIIAMAATAIYASYALFLGWAAGNSVIFGEYLLHAFGVQVNRWNQRGIGLVCITVAFIIHATAVKWGLRIQNTLGVLKLVVILIIAVGGLLACAGFVNIDRPRNFEHPWGEGPPTVYGIVMGLYNVIWSYVGYSNANYCLSETRNPVRTLKIAAPIGVAMVGILYFLVNVAYFAAVPKEEMLLSGRILAASFFRNVFGFKAERALSTFVAFCAFGNVLAVLFSQGRIVQALGREGVLPFSRFWASNKPFNSPAAGLFQHYIVSVVVMLAPPPGDAYNFLLNFQSLIGYPLSTVNVLVSGGLLHIYFCPERYPTWSPGIRATLPVTFFFFFSNVYLAVAPFLPPPRRVGNVYERLPYYTHCLAGLTIFALGALYWLFWAKILPWMGEYRLGEESVVGQDGWARKIVQRIPTAPELEEQGRRNGSMWS

SEQ ID NO: 157727 - DNA, 1728 bp, Neosartorya fischeri NRRL 181
  CDS (1)..(1728)
atggggttccaatccaagtccgagcaaaatgatcagtctgatgcttcgagcttcagcagtggtgacctgcaatacactgctcaagccggggccaactcctctgtgccaacgtaccaagaagccagcggtgcgccggtcgaaatcaattcaccgttgggatactcggttggttggattactgtcatctttctcaatctcagcaagatgatcggaaccggtgtcttttccaccccatcaactgtcctcaaaggcgccgggtccgttggcctggcattgttctactgggtcattggattcctcatggccggcagctcactggccgtctacctggagttttcgtcctatttccccagtcggtccggctcagaggtagtttatctcgaacaggcgtatccgcgaccaaagtacttccttccgactgtttttgcaatgcaatcggtgttgttctcatttagcagtagtaatgcgattgtcctcgcgcagtatctttttcgacttgcggaggcgcagtccacaccgtggaagctcaagggtgttgctgtcgcttcgtatagcgtggcagtgctagttctggcattcaacacgaaatggtcgctacgtttcgccaatgccattggcttcgtcaagctagttacattaatcttcatcggtatcaccggcttagttgtccttgggggacacaccaagatcgaagatcccaaggccaattttcgcgatgcctttgcgggtagctcctctgcctcggtgtatggtgccacaaacgcactggtcaaggtagccttctcgtacgcgggattcgaaaatgcgttcaacgtggtgaatgaagtcaagaatccagtcaaaacgttgcgatggagcgcgccgctctccctcctgctagtagcaaccctgtacatgcttgccaacatcgcctatttctccgccgcaacaaaggaagagatccttggctcaaaggtcgtagcggcgagtatcttcttccagaaagtcttcggcacgagcagtgcgtcacgagccctgaactttttgatctgtctcagcgcattcgggaacctgcttgccgttctcatcgggcagtcccgtctcctccgagaatgcggaagacaaggagtcctcccgttcaccaagttctggacctcgactcgtccattcggcacgccgcttggcccctacgcgctgaaatgggccttgaccgtcctcatgattctagctccgccagccggtgacgccttcaattttgtcgtcgacctgggcgtctaccccaccaacgcgttcgccttattcctcgccattggactattgctcacccgtcgtcaccgtaaacggcacaacattccaccctctgggtacaaggcgtgggacgtggtcgtcggcttctccatcctctcgaatctgtatatggtagttgcgccgtggtatccgcccacgacgggggcgaacggaggggatgtgagtttctggtatgcgacgtactgcgtcgtggggttgggaattattgggctctgtggggtgtattactacgtctatatcaaggtgttaccgcggcttggcgggtatgcgttccggcagattgtcctgcagatggaggatggggcgacagcgcataaattggtcaaggttccgaaggagcagttgaaggcttgggatgccgaacatgatgctacggggagagagcgagcgatggatgaggctgttagtacggctgttgatgtcaagcacgatggcgtatag

SEQ ID NO: 157728 - protein, 575 aa, Neosartorya fischeri NRRL 181
MGFQSKSEQNDQSDASSFSSGDLQYTAQAGANSSVPTYQEASGAPVEINSPLGYSVGWITVIFLNLSKMIGTGVFSTPSTVLKGAGSVGLALFYWVIGFLMAGSSLAVYLEFSSYFPSRSGSEVVYLEQAYPRPKYFLPTVFAMQSVLFSFSSSNAIVLAQYLFRLAEAQSTPWKLKGVAVASYSVAVLVLAFNTKWSLRFANAIGFVKLVTLIFIGITGLVVLGGHTKIEDPKANFRDAFAGSSSASVYGATNALVKVAFSYAGFENAFNVVNEVKNPVKTLRWSAPLSLLLVATLYMLANIAYFSAATKEEILGSKVVAASIFFQKVFGTSSASRALNFLICLSAFGNLLAVLIGQSRLLRECGRQGVLPFTKFWTSTRPFGTPLGPYALKWALTVLMILAPPAGDAFNFVVDLGVYPTNAFALFLAIGLLLTRRHRKRHNIPPSGYKAWDVVVGFSILSNLYMVVAPWYPPTTGANGGDVSFWYATYCVVGLGIIGLCGVYYYVYIKVLPRLGGYAFRQIVLQMEDGATAHKLVKVPKEQLKAWDAEHDATGRERAMDEAVSTAVDVKHDGV

SEQ ID NO: 157729 - DNA, 1629 bp, Neosartorya fischeri NRRL 181
  CDS (1)..(1629)
atggatgattctgaaaatcaaccactcctataccccacatccgctctgtatgaaactctttcctacgagtctatccaggacatcagaacaaatgggcgtcctgtgtctagccgcagcacaatccccgagactgccagctacggccgtaacctcacatggacgagcgcctatatcctggtaatatcgcgcgtcatcggcagcggcatctttgcaaccccaggctcaatcgtgaagtcggtgggaagcgttgggttggcgctgctggtatggctcgtggggacagtgctggcagcatgcggcctggctgtatcgatggagtttggctgtatgctcccccggtctggtggcgacaaggtctatctcgaatatacgtatcggcgtcctcggtttctggcatcaacgttgatcgccgttcaggcggttttgttgggctttacggcgagcaactgcattatattctccaagtacaccttgttcgctctgagcattgagccgacagaataccagcaaaaggctctggctgtaggcctcatgactgcaattaccattgttcatgggtgcttcctgaaaaccggcatatggatacagaacctgctgggatggatgaagattttcatgattgcagcaatgacactgacggggctctgggtgatactctttcgccgtgaggaacagtccatgtccgtgtcgaatgatgcgggcaggacagggtacgacgtctttctgtgggacaatctatgggaagggtcgaactggagctggagcttgctttcaacatcccttttcaaagtgttttactcgtatgctgggctgaataatgtgaacaacgtcctcaacgaggtccaggacccgatccggacagtcaaatccgtttgcccgtccgctctcgtcactgcttgttgtctttacctactggcaaacatctcctactttctcgtcgtcccaatcgaagagatcaagaacagtggtgagctcgttggggctctcctgttcgaacgcgttttcgggccgcatgttggcaggaccttgtttcccctggcgattgcgatttccgccgcaggaaatgtcatggtagtcacatttgcctgggcacgggtaaatcaggagattgctcgacagggcttcctccctttctcctccatgctctcatcatctcgcccgttcaactctcctctaggcggcctgattgtacattatatcccttccctcttagtgattgtacttccgcctcccggagacgtgtatagtttcattctagatgttgagggctatccaggccagatcttcgccttggctattgcagttggcttgctgattttgaggcgacgtcaacctaatattccacgaccgttcaaggcatggcttcctgcggtctggctccgaatcgtcgtgtgtgttgctctactggcggcgccgtttattcctcctccggacagaaagggcgatgtgggctttttctacgcaacatacgcagtcgtgggtgtcggcattctactctttggggtggtttattggtatgtttggaccgttctccttccacggtgggggggatacagattagaagaagaggtaaatgtgctgaatgatgggaccagtattacgaagcttgtgccgtcgtatattctctag

SEQ ID NO: 157730 - protein, 542 aa, Neosartorya fischeri NRRL 181
MDDSENQPLLYPTSALYETLSYESIQDIRTNGRPVSSRSTIPETASYGRNLTWTSAYILVISRVIGSGIFATPGSIVKSVGSVGLALLVWLVGTVLAACGLAVSMEFGCMLPRSGGDKVYLEYTYRRPRFLASTLIAVQAVLLGFTASNCIIFSKYTLFALSIEPTEYQQKALAVGLMTAITIVHGCFLKTGIWIQNLLGWMKIFMIAAMTLTGLWVILFRREEQSMSVSNDAGRTGYDVFLWDNLWEGSNWSWSLLSTSLFKVFYSYAGLNNVNNVLNEVQDPIRTVKSVCPSALVTACCLYLLANISYFLVVPIEEIKNSGELVGALLFERVFGPHVGRTLFPLAIAISAAGNVMVVTFAWARVNQEIARQGFLPFSSMLSSSRPFNSPLGGLIVHYIPSLLVIVLPPPGDVYSFILDVEGYPGQIFALAIAVGLLILRRRQPNIPRPFKAWLPAVWLRIVVCVALLAAPFIPPPDRKGDVGFFYATYAVVGVGILLFGVVYWYVWTVLLPRWGGYRLEEEVNVLNDGTSITKLVPSYIL

SEQ ID NO: 157731 - DNA, 1614 bp, Neosartorya fischeri NRRL 181
  CDS (1)..(1614)
atgagcgacccggtaacagagtcgatttatcagaaaggcgccatgcctgaggacaagccgttcagcgaaaccccacggagggcggacggagtctcccagctgtacgagggcaatgtttttgatgcgacaccagacgaccgtcgacagatcggcgtcgtcagtgcgtctttcctgatcttcaaccgtgtcatcggtacaggtatctttgccactccggcaacgatcttgggattgtgtggtagtgttggtctgtcgctcttcatgtgggttgcgggtactgccatcgccatggcgggtaccgcggtgtatttggagtggggtactgctattccgaagaacggtggcgagaagaattacctcgaatacgtctacagaaaacccaagttcctggctacggccatgtttgctgcgtacgctgtcttgctgggctgggccgcgagcaacagtgtcgtgtttggcgagtatatcctcaatgctgccgatgtggaggtcaatcggtggaatcagcgcggtattggattggcttgcgttactgctgccttcctcatccacgctcttgctgtgaaatggggtcttcgtctccagaacttgcttggtgtgatcaagctggtcattatcctgtttgtcattgttgctggctgggtggcgctggccggtcataccaaggctgagacgcctcataactttaagaatgcttttgagggcacaactggcagcggttatggtattgtcatggctttgtacaacgtcatctggtcgtttatcggatactccaacgccaactatgctctgagcgagacgaggaatcctgtacgcacgctgaagatcgcggcgccgatcgctatcggatctgtgggcatcctctacatgctgtgcaatatcgcctactttgctgccgtgtccaaggaagatatgctctcttcgggccaaacggtggcagcgaaattcttcgggaacatgttcggtgctcgtgctgagaaggtgatgtcggtcttcgtggcattgtcggcttttggaaatgtgttgtccgtgatcttctctcaaggacgaattgtccaagaacttggtcgtgagggtgttttgcccttctcgaggctttgggcgagtaacaagccgttccactcgccagctgccggtctgtttgagcactgggtcgtttcggtcatcattatgctggctcccccgccgggtgatgcgtacaatttcctgctcaacctgatctcctatcctctatccattgtgaacgtcttcgtgtccggcggtcttatctatatctacctcacacgttcaacacgctttcctgactgggctcccgggatccgcgcgaccctcccagtcaccatattcttcttcctatccaacatatacctggtcattgcaccatacattccgccctcggagggacagagtgtttacgaagaacttccctactaccttcactgtgtcgtggcgctcggcatctttgccttgggcgcgatatactatgtggtgtgggcgattctgatgccacgctttggtcgctacatgctggtcaaagaaaccgtggttgacgctgatggctggtccagaagcgttttcacccggctgccgctcgcggaagctgagcgagtttga

SEQ ID NO: 157732 - protein, 537 aa, Neosartorya fischeri NRRL 181
MSDPVTESIYQKGAMPEDKPFSETPRRADGVSQLYEGNVFDATPDDRRQIGVVSASFLIFNRVIGTGIFATPATILGLCGSVGLSLFMWVAGTAIAMAGTAVYLEWGTAIPKNGGEKNYLEYVYRKPKFLATAMFAAYAVLLGWAASNSVVFGEYILNAADVEVNRWNQRGIGLACVTAAFLIHALAVKWGLRLQNLLGVIKLVIILFVIVAGWVALAGHTKAETPHNFKNAFEGTTGSGYGIVMALYNVIWSFIGYSNANYALSETRNPVRTLKIAAPIAIGSVGILYMLCNIAYFAAVSKEDMLSSGQTVAAKFFGNMFGARAEKVMSVFVALSAFGNVLSVIFSQGRIVQELGREGVLPFSRLWASNKPFHSPAAGLFEHWVVSVIIMLAPPPGDAYNFLLNLISYPLSIVNVFVSGGLIYIYLTRSTRFPDWAPGIRATLPVTIFFFLSNIYLVIAPYIPPSEGQSVYEELPYYLHCVVALGIFALGAIYYVVWAILMPRFGRYMLVKETVVDADGWSRSVFTRLPLAEAERV

SEQ ID NO: 157733 - DNA, 1614 bp, Aspergillus clavatus NRRL 1
  CDS (1)..(1614)
atgagcgatccggtgacagagtcgaactatcccaaaggcgtctcgcctgacgcgaagccgctcagtgaaggccctaggagggcggacggagtctcccagctttacgagggaaatgtcttcgatgccacaccagaggaccgtcgccagatcggcgtggtcagtgcctcgttcctgatcttcaaccgtgtcatcggcactggtatcttcgcgaccccggcaactattcttcaactgtgcggcagtgtcggtctctcccttttcatgtgggtgataggcactattatcgccatggctggtaccgccgtctacctggagtggggtactgctatcccgaaaaacggtggagagaaaaactacctcgaatacgtcttcaagaagcccaaatttctggccaccgccatgttcgctgcctacgccgtcctcctgggctgggccgccagcaacagtgtcgtgtttggcgagtatatcctcaacgctgctgacgttgaggttggtcgatggaatcagcgcggtattggtttggcgtgtgtcaccgccgctttcctcatccacgctttcgccgtgaagtggggtctccgtctccagaacttgcttggtgtgatcaagctcattatcatcgtgttcatggtcgtctgtggctgggtcgccctggccggccataccaagatcgagacgccgcacaacttcaggaacgcattcgaaggcaccactggcagtggatatggtattgtcatggctttgtacaacgtcatctggtcattcattggttattctaatgccaactatgctctgagcgagacgaagaaccccgcgcgcactctgaagatcgcagcgccgattgctatcggttccgtgggcattctgtacatgctgtgcaatattgcctacttcgctgctgtgccgaaggagcaaatgctcgcgtccggccagaccgtggcggccacctttttcggaaacatgttcggtgctgaggccgaaaaggtcatgtcggtctttgtggccttgtcagccttcggaaacgtgctgtcagtcatcttctcgcaaggtcgaattgtccaagagcttggccgtgaaggtgttctgcccttttcgaaactctgggccagcaacaagccattccactccccggctgccggtctgtttgagcactgggttgtctccgtcatcatcatgctggctcctcccccgggcgatgcgtataacttcctgctcaacctgatttcctacccactttccctcgtcaacgttttcgtggctggcggtcttatctacatctatttgacccagaagaccaacttccccaactgggcgccttcaattcgcgccactctccccgtcaccattttcttcttcctgtccaatatctacctggtgatcgcaccatacatcccgccctcggagggtcagaatgtgtaccaggaacttccatactacctccactgcgtggtggctctcgggatcttcggtgcgggtgcgatctactacgtggtgtgggcgatcttgatgccacgctttggccgctacatgctggtcaaggagagcgtggtcgatgccgatggctggtccagaagcgtcttcactcggctgccgcttgcggacgccgagcgatcataa

SEQ ID NO: 157734 - protein, 537 aa, Aspergillus clavatus NRRL 1
MSDPVTESNYPKGVSPDAKPLSEGPRRADGVSQLYEGNVFDATPEDRRQIGVVSASFLIFNRVIGTGIFATPATILQLCGSVGLSLFMWVIGTIIAMAGTAVYLEWGTAIPKNGGEKNYLEYVFKKPKFLATAMFAAYAVLLGWAASNSVVFGEYILNAADVEVGRWNQRGIGLACVTAAFLIHAFAVKWGLRLQNLLGVIKLIIIVFMVVCGWVALAGHTKIETPHNFRNAFEGTTGSGYGIVMALYNVIWSFIGYSNANYALSETKNPARTLKIAAPIAIGSVGILYMLCNIAYFAAVPKEQMLASGQTVAATFFGNMFGAEAEKVMSVFVALSAFGNVLSVIFSQGRIVQELGREGVLPFSKLWASNKPFHSPAAGLFEHWVVSVIIMLAPPPGDAYNFLLNLISYPLSLVNVFVAGGLIYIYLTQKTNFPNWAPSIRATLPVTIFFFLSNIYLVIAPYIPPSEGQNVYQELPYYLHCVVALGIFGAGAIYYVVWAILMPRFGRYMLVKESVVDADGWSRSVFTRLPLADAERS

SEQ ID NO: 157735 - DNA, 1656 bp, Pichia stipitis CBS 6054
  CDS (1)..(1656): transl_table=12
atgggtctcactgacttctacaaaacaaactcgactaacgagaagcacaatgagcagccaggctcggccagtttaacttcggcctctgataacgaagctgccgtcatccaaattgatcaaaacaagaaggaaattggttatgtttcggccacctttttgatgcttaacagaatgttgggtgccggtgtgttttccactggttccactattttcgccctttctggatctgttggaactgccttgatgatgtggttcgcaggtactatcattgcactttccggtttgttggtgtatatggaattgggatctgccttgcctagaaacggtggtgaaaagaactatttagaatacttgttcaagaagcctaaattcttggtcactgccatgtacgcttcctatgttttcttcttgggttgggctgctggtaactctattgtcgtcggtgaatatattttgaacgccgcaggcaaggaagttactcaatggaactccagaggtattggtattgctgtcattacctttgccttcttaatcaatgccatcaatgttaaggctggtttgttcttggccaactccttaggtgtcttcaaggtgttcattgtgttgttcatcacagtcacaggttgggttgcccttggtggtggtatcaagactaacaacttccaccctactggaaacttccacaatgctttctctggtgaaacccctactgctttcggtattgttaatgctttgtacaatgtcatttggtcgtatgtgggttactccaatgctaactatgctttgggtgaaatcaagaaccctgtcaaagtcttgagagtcgctgctccaaccgcttttatcttcttgggtattatctatatgtttgttaacattgcttactttgctgttgttccaaaggaagaaatcgctggttccggtagaattttagctgcctccttcttcaagttcgcttttggtgactctgctgaaaaggctgcctctgtatttgtcgctttgtctgcctgggccaacgtcatgtctgtcattttctcccagggtagaattgttcaacaattgggtcgtgaaggtgccttgccattctcgagattctttgctacttccagacctttcagcactccatttgttggtttgatggaacattggattgtctgtatcatcaccattgttgctccacctccaggtgatgcttacaactttgtgttgaacttgatttcttacccattgaacgttgtcaacactgttcttgccggtggattgctctatgtctattaccaaagatacagaggtttgaccgaatggaaccctcctattaaggccactttgcctgttgtcgctttcttcttcttagcttccttgtacttgattgttgctccttacattcctccagtgaagggacaaactgtctacaattctttgccatactggatccatgccgttgtcacttggggtgtctttggtatcggtttagtttactggattgtctgggccaagatccttccaaaaatcggtaactacaccttggtttcaaaggaaatcattggtgaagacggtttctggagaaacaaaatctacaagatcgcaaatgatggttccaatagggaagaaatcgaaaatgatggtaacgacagttccgatactaagggcataaattag

SEQ ID NO: 157736 - protein, 551 aa, Pichia stipitis CBS 6054
MGLTDFYKTNSTNEKHNEQPGSASLTSASDNEAAVIQIDQNKKEIGYVSATFLMLNRMLGAGVFSTGSTIFALSGSVGTALMMWFAGTIIALSGLLVYMELGSALPRNGGEKNYLEYLFKKPKFLVTAMYASYVFFLGWAAGNSIVVGEYILNAAGKEVTQWNSRGIGIAVITFAFLINAINVKAGLFLANSLGVFKVFIVLFITVTGWVALGGGIKTNNFHPTGNFHNAFSGETPTAFGIVNALYNVIWSYVGYSNANYALGEIKNPVKVLRVAAPTAFIFLGIIYMFVNIAYFAVVPKEEIAGSGRILAASFFKFAFGDSAEKAASVFVALSAWANVMSVIFSQGRIVQQLGREGALPFSRFFATSRPFSTPFVGLMEHWIVCIITIVAPPPGDAYNFVLNLISYPLNVVNTVLAGGLLYVYYQRYRGLTEWNPPIKATLPVVAFFFLASLYLIVAPYIPPVKGQTVYNSLPYWIHAVVTWGVFGIGLVYWIVWAKILPKIGNYTLVSKEIIGEDGFWRNKIYKIANDGSNREEIENDGNDSSDTKGIN

SEQ ID NO: 157737 - DNA, 1638 bp, Aspergillus niger CBS 513.88
  CDS (1)..(1638)
atgggtggtggggtggtgggaataacgccatcacgcttgcaggttagatttgccatcgacatgggccgtgacacgatttcccaggtgacgatcgagacggatgcgtctcgctctcgcgatgacagcctcaaggccggggagagactctctgtcaatgaaaaccatgtgcttcaggatcgcaagattggagcgctgggagccatctctctggttgtcaataagatagttggcgctggaatcttctctacaccatccactatctttaaactctctggtagtgtgggcttgtcgctgatcctctgggtagtggccggaatcatctccgcctgcggtgccctggtgatgctggaattcggcagcgggatgcctcgatcgggaggcatcaaggtatatctggagcgatgcttctccccaaagcagatgcagacctgcatttacctcttcttctgcttgtttctgcaggtctctgccagcaacgcaatcaccgcatcggaatatttgctgtccgctgctggggtagactctacgacctggaaggaacgagggctagccattgcggccgtgtcatttgccgtcggcgtccacacctgcgctccccggatcgggcgcgcaatgcaggatctgctgagtatggtcaagctcttcactttactgttcatcgtgtgtacgggttttgccgctctggctggccatcgacgcatccctaaccctcacaacttcgacgtgaagacatcctttgagggcacctcgaacaatggatatgaaatcgggacggctctcctggatgcgatattctcgtatcaggggtatgataatgtaaatgcggtcctctccgaggttaaaaaccccgaacacaccctgcgcattgctctcccctccgccatggggatcatcacggtgttgtacgttcttgctaatgtagcctactttgctggtgtctccaaggaagaattccgatcagccaatgtcacaattgccgccagcctattccgcaacgtgttcggcgagacagccgcaacgcgagcccttcctgctctcgttgctctgtctgccatcggccatttgttgggagttgcgtttgtcgtcccgcgtttgcttcaagaactcgcgaaagacggtatcaccccgtttcccaacatcatgatgcagaaccggccattcaagaccccgatcgcagcactgttcgtgcatctctgcgtcacgattctatttatctgcgctccacccgcaggagatgctttttcattcgtcgttggactttcatcctatccgatgtgcgtgatgttgacagccattacggtgggtctggtgaagatgcgattcacgccgtccgaggggtggtcgtcgtcctacagcgcgctatggccggtcattgtgttttacctggcggccaatgttttcctattagttatgccgttcgttccgcctaattcgagcacatctagcatcccttattggctgagtcctgtagtagcattagggatcctcgggctcggtgtgatatactaccttttacggttcgttctattgccgtgggtgttcggctacagccttcgtccagtgacgaaagacttgacggacgggtcgcgggttgctcagagctgtcttgaccaaccttccgatttggcttcgaaatga

SEQ ID NO: 157738 - protein, 545 aa, Aspergillus niger CBS 513.88
MGGGVVGITPSRLQVRFAIDMGRDTISQVTIETDASRSRDDSLKAGERLSVNENHVLQDRKIGALGAISLVVNKIVGAGIFSTPSTIFKLSGSVGLSLILWVVAGIISACGALVMLEFGSGMPRSGGIKVYLERCFSPKQMQTCIYLFFCLFLQVSASNAITASEYLLSAAGVDSTTWKERGLAIAAVSFAVGVHTCAPRIGRAMQDLLSMVKLFTLLFIVCTGFAALAGHRRIPNPHNFDVKTSFEGTSNNGYEIGTALLDAIFSYQGYDNVNAVLSEVKNPEHTLRIALPSAMGIITVLYVLANVAYFAGVSKEEFRSANVTIAASLFRNVFGETAATRALPALVALSAIGHLLGVAFVVPRLLQELAKDGITPFPNIMMQNRPFKTPIAALFVHLCVTILFICAPPAGDAFSFVVGLSSYPMCVMLTAITVGLVKMRFTPSEGWSSSYSALWPVIVFYLAANVFLLVMPFVPPNSSTSSIPYWLSPVVALGILGLGVIYYLLRFVLLPWVFGYSLRPVTKDLTDGSRVAQSCLDQPSDLASK

SEQ ID NO: 157739 - DNA, 1650 bp, Aspergillus niger CBS 513.88
  CDS (1)..(1650)
atgacggacccagttgtggaatctgcgtatcaaaagggcatcctgcccgacgccaaggccgtcgaggaaggtcctcgtcgaacggatggcgtttccggtttgtatgaaggaaatgtcttcgaggctaccccggatgaccgtcgccagattggcgtcatcagtgcctcctttctgatcttcaaccgtgtcattggtactggtatcttcgctaccccaagtactatcctgtctttgtcgggtagtgttggtctgtctctgatcatgtgggtcattggtactttgattgccatggctggtactgctgtttatctggaatggggtactgctattcctaagaacggtggagaaaagaactacctcgaatatgtcttcaagaagcccaagttcctgatgacggccatgtacgcggcctatgcagtcctgctgggttgggccgccagtaacagtgtcgtctttggcgagtatattctgaacgcggcggacatcgaagtggatcgctggaaccagcgtggtattggtttggcttgtatcaccgctgccttcctcatccattccttcgctgtcaagtggggtctcatgcttcagaactttctgggtgtggtcaagctggtcatcatccttttcgtcatcgtcgccggatgggtggctctcggcggccatatgaagatcgatcctcctcacaacttcaccaacgcgttcgagggtaccactgacaccggctatggcattgtcatggcgttgtataatgtcatctggtccttcatcgggtactcgaatgccaactacgccttgagcgagacgaagaaccctacccgtaccctgaagatcgccgcccccattgccatcatctccgtcggtatcatgtacatgctgtgcaacatcgcatactttgctgctgtcccgaaggagcagttcctgtcctctggccagaccgtcgccgccgccttcttcggcaacatgttcggtgcgcgcgcagagaaggtgatgtcggtctttgtggccctgtctgcatttggtaatgttctgtcggtcatcttctcgcaaggacgaattgtccaagccctcggtcgcgaaggagtcctccctctgtcgaagatctgggccagcaaccggccgttcaactcgcccgccgctggcctcttcgagcactgggtagtgtccgtgatcatcatgttggccccgcctcccggcgatgcctacaacttccttgtgaacctgatctcgtacccgctgtctatcgtcaacgtcttcgtgtccggcggtctcatctacatctatctgaccaaggagaagaacttcccggactggtcccccggtattcgggccacactccccgtcaccatcttcttctgcctgtccaacatgtacctggtggtggcgccctacgtgccccccagtgccggacagagcgtctacaacagcctgccttactacctgcactgtgtggtggcgctgggcattttcgccctcggcgctatttactatctagtctgggcggtgctgatgcctcgctttggtcgctatatccttgtgaaggagtcggtcgtggatgctgatggctggtccagaagtgtctttacaaagatgccgattgagcaggctgaggctttgaggcatgaagggcagcagcagggagagcaccatttctga

SEQ ID NO: 157740 - protein, 549 aa, Aspergillus niger CBS 513.88
MTDPVVESAYQKGILPDAKAVEEGPRRTDGVSGLYEGNVFEATPDDRRQIGVISASFLIFNRVIGTGIFATPSTILSLSGSVGLSLIMWVIGTLIAMAGTAVYLEWGTAIPKNGGEKNYLEYVFKKPKFLMTAMYAAYAVLLGWAASNSVVFGEYILNAADIEVDRWNQRGIGLACITAAFLIHSFAVKWGLMLQNFLGVVKLVIILFVIVAGWVALGGHMKIDPPHNFTNAFEGTTDTGYGIVMALYNVIWSFIGYSNANYALSETKNPTRTLKIAAPIAIISVGIMYMLCNIAYFAAVPKEQFLSSGQTVAAAFFGNMFGARAEKVMSVFVALSAFGNVLSVIFSQGRIVQALGREGVLPLSKIWASNRPFNSPAAGLFEHWVVSVIIMLAPPPGDAYNFLVNLISYPLSIVNVFVSGGLIYIYLTKEKNFPDWSPGIRATLPVTIFFCLSNMYLVVAPYVPPSAGQSVYNSLPYYLHCVVALGIFALGAIYYLVWAVLMPRFGRYILVKESVVDADGWSRSVFTKMPIEQAEALRHEGQQQGEHHF

SEQ ID NO: 157741 - DNA, 1617 bp, Pichia guilliermondii ATCC 6260
  CDS (1)..(1617): transl_table=12
atgttgggactgtcgaaatcctccgacaaggaggaggataagtatattgaaaactggtcgttgaagagcggggacccggaagcggtggtgcaacttgatcagaacaaaaaagaaattggttttatatctgcaacttttctttgtttgaaccgtatgctcggagctggagttttctctaccggatctactatctttattctttccggaagtgtggggacttcgcttattatgtgggcagccggttccttaattgctttttctggattgttggtgtacatggagttgggactggctataccgagaaacggtggagagaaaaattatttggagtatatctacaagaagcctcgatttttcgtgacggcgatgtatgcgtcatacgtgttctttttgggatgggctgcgggaaactcggtggtggttggtgagtatcttctcaatgctgctggaaaagaagttacccaatggaactctcgaggaattggaattggagttatcacatttgcttttttgatcaacgggttgcacgtgaagactggtttgtttgtagcaaatgtgttgggaacgttcaaagttgtgattgtggtgttaatttccatcactggctgggtcgccttgggaggaggaatcaagaataaagatttccataaaactcacaatttctcagatgcgtttctgggaaccacacccagaggttttggaatcgtcaatgctttgtacaatgtgatttggtcatatgttggatactcgaatgtcaactacgcattgggtgaagtcaagaacccagtaagaatcttgaagattgctgctccttctgcctttctttcgttggtggttctctacatgtttgtgaacattgcctactttgccgtggttcccaaggaggaaatctcgctgtctggtcgtattcttgcggcttctttcttcaagtatgcctttggtgataccgcagaaaaagctgcttcggtctttgtggctttgtctgcgttgggaaacgtcatgtctgtgatcttttcccaaggaagaatcgtccaggctctcggtcgtgaaggtagtcttccattttctcgtttttttgcaacctccaaacctttcagatctccatttgtgggtttgtttcaacattggatcgtctgtattgtcacaatcgtggctccacctccaggagatgcctacaacttcattctcaacttgatttcatacccattgaatgtcgtcaataccgcagttgcagccggtttgttatacttgaactaccaaaaatggaaagggaaagctgaatggaatcctccaatcaaggcaactgttccagtcgttgccttcttcttcttgtcgtcattgtaccttatcgttgctccttatattccaccttcacatggacaaagtgtctacaatagtcttccatactggattcatccagtggttacttggggtgtttttggggttggtttcgtctactggatcttctgggctaaggtattgccccatctcggcggatacaccttggtgagcaaagaagttttgggagaagatggattttggcgcaacaaattttacaagctttccaatgatgaagacatttctacagaagtcgatggtgccgacgtcgtaagctag

SEQ ID NO: 157742 - protein, 538 aa, Pichia guilliermondii ATCC 6260
MLGLSKSSDKEEDKYIENWSLKSGDPEAVVQLDQNKKEIGFISATFLCLNRMLGAGVFSTGSTIFILSGSVGTSLIMWAAGSLIAFSGLLVYMELGLAIPRNGGEKNYLEYIYKKPRFFVTAMYASYVFFLGWAAGNSVVVGEYLLNAAGKEVTQWNSRGIGIGVITFAFLINGLHVKTGLFVANVLGTFKVVIVVLISITGWVALGGGIKNKDFHKTHNFSDAFLGTTPRGFGIVNALYNVIWSYVGYSNVNYALGEVKNPVRILKIAAPSAFLSLVVLYMFVNIAYFAVVPKEEISLSGRILAASFFKYAFGDTAEKAASVFVALSALGNVMSVIFSQGRIVQALGREGSLPFSRFFATSKPFRSPFVGLFQHWIVCIVTIVAPPPGDAYNFILNLISYPLNVVNTAVAAGLLYLNYQKWKGKAEWNPPIKATVPVVAFFFLSSLYLIVAPYIPPSHGQSVYNSLPYWIHPVVTWGVFGVGFVYWIFWAKVLPHLGGYTLVSKEVLGEDGFWRNKFYKLSNDEDISTEVDGADVVS

SEQ ID NO: 157743 - DNA, 1665 bp, Lodderomyces elongisporus NRRL YB-4239
  CDS (1)..(1665)
atgggattctcagatatatacaagtttctgagtaatagtcagacagaaaaacacgctgactctagtgtcgacaacagcagtcaattgagctcaggcttggaagaaggcggaatcgtgcaaacagataagaatgtcaaagagattggtatcatttctgcatcctttttgatgctcaacagaatgttgggtgccggtgtcttctccaccggttccacaatatacgcgttatccggttcagtgggaacctcattgatgatgtggtttgcaggaacagttatcgcattcacaggtttattggtatacatggaattgggaacagctattcctagaaatggtggtgaaaagaattatttggaatatatgtttcagaaacccaagttcttggtcacggcaatgtacgcctcatatgtgttttttcttggatgggccgcaggtaactccatcgttgttggagaatatatcttgaatgccgcaggtaaagaaccaggacaatggaactcaagaggtatcgcattggcagtgattacatttgcattcttgatcaatggtataaacgtcaaggctggtttgtttttggccaacgcattgggtgtcttcaaaatcgttattgtcctattcatctccgttactggatgggttgctttgggtggcggaatcaaaacaaataatttcaaaccaacaggaaactttcacaatgcattccaaggtgaatcaccttcgggtttcggtattgtgaatgccttgtacaatgtcatttggtcctatgtcggttactcaaacgccaactatgcgctcggtgaaattaaaaaccctcaaaaagtgttgaaaattgctgctcctgcagcatttattggtctcggtatcatctacatgtttgttaatattgcatattttgccgttgtccccaaggaagagattgcctcctcgggaagaatcttggcggcatcctttttcaagtacgcatttggagatcaagctgaaaaagccgcttccgtgtttgttgccttgtctgcttgggccaatgtcatgtcagttatcttttcccaaggtagaattattcaacagttgggccgtgaaggttcattgccattctcaagattctttgccacttcaaagccattcaatacaccatttgttggtttattccaacactggatcgtttgtattgtgaccatcttggccccacctccaggtgatgcatacaactttatcttgaatttgatttcctacccattgaatgttgtcaataccgttattgctgcaggattgatttggatctactacaagaaatacaagggcttgactgagtggaaccctccaatcagagctactttgccagtaacgatattctttttccttgcttccttgtacttgattgttgccccatacattccgccaatcaatggacaaaaagtttacaatgatatgccatactggatccatgctgttgtgacatggggtgtgtttggaattggattgttttattggatcgtgtgggtcaagattttgccatactttggtggataccgactcgtggcacaagaagtgcttggtcccgatggattctggagaaacaagatttataaggtgtcaaaagatagcgttgatgctggtgaagtacctgtcgaggtggaggaagctaaagaagctcaagtagtggggtga

SEQ ID NO: 157744 - protein, 554 aa, Lodderomyces elongisporus NRRL YB-4239
MGFSDIYKFLSNSQTEKHADSSVDNSSQLSSGLEEGGIVQTDKNVKEIGIISASFLMLNRMLGAGVFSTGSTIYALSGSVGTSLMMWFAGTVIAFTGLLVYMELGTAIPRNGGEKNYLEYMFQKPKFLVTAMYASYVFFLGWAAGNSIVVGEYILNAAGKEPGQWNSRGIALAVITFAFLINGINVKAGLFLANALGVFKIVIVLFISVTGWVALGGGIKTNNFKPTGNFHNAFQGESPSGFGIVNALYNVIWSYVGYSNANYALGEIKNPQKVLKIAAPAAFIGLGIIYMFVNIAYFAVVPKEEIASSGRILAASFFKYAFGDQAEKAASVFVALSAWANVMSVIFSQGRIIQQLGREGSLPFSRFFATSKPFNTPFVGLFQHWIVCIVTILAPPPGDAYNFILNLISYPLNVVNTVIAAGLIWIYYKKYKGLTEWNPPIRATLPVTIFFFLASLYLIVAPYIPPINGQKVYNDMPYWIHAVVTWGVFGIGLFYWIVWVKILPYFGGYRLVAQEVLGPDGFWRNKIYKVSKDSVDAGEVPVEVEEAKEAQVVG

SEQ ID NO: 157745 - DNA, 1593 bp, Ajellomyces capsulatus NAm1
  CDS (1)..(1593)
atgtcgcagttaccagatgttcgatcaagcgcatctccgttctgcaaggatatttcgtctcgggctgtgatatcaggaagcacaaggcagcataggagctctagaaataccagcagcgtgacggagcaatgccctgaaaaccgaagacagataggtgtcattagtgcttcctttttgatctttaataggatcatgggaacagtatggatcatgggaatggttattgctatgactggcacggcagtctaccttgaattcggaactacaatcccaagaaacggaggggaaaaaaattatctcgagtacgtgtataccaagccgaaattcctagtcacagcgatgtttgcttcgtatgccctgtttctaggttgggcggcaggtaatagcgttgcgtttggtgaatatgtccttcatgcggcggacattgaggtaaaccgatggaatcaacggggcatcggttttgcatgtatcaccttggcatttctcatacatgcaacagccgtcaaatggggcctacgcctgcaaaatctccttggcgctttgaagttccttgtaatcctcattatagtggttggaggggccgtggctcttggtggccacttgaccatggagaaacctgataacttttctcgaccgtttgaaggaagtattccaagtgtatatgggattgtaacggcattgtacagcgtgatctggtcgtacgttggatattcgaatgcaaactattcattgagcgagacgagaaatccagctcgaacattgaaaatcgccgcgcccataggggtggggcttgccagcgttttgtatatgctggtcaatgttgcatactttgctgttgtcccgaaacaagagatcttgggttctggacgtatcctggccgcttccttttttcgaaatgtttttggccccaaggcagagagggttttatccatttttatagctttgtgtgccttcgggaatgttcagtctgttatattttcccagggaagaattatccaagaattaggccgggaaggggttctgccattttccaggttctgggcaagcaataggcctttcaattcgccggccgcagggctgttcgagcattatcttatatccgccgttgttatgcttgctccaccaccaggagacgcatacaacttcttgctcaacttgatttcgtatccgctctcggtcgtaaatatatttgtctcggccggtttgttgcatatttatatgtttccgaaaagctacccggactggtcaccgaccgtgcgtgccaaccggctcgttaccatatttttcttgctttccaacgtcttcctagcagtggcaccctatctaccgccgccagacaaggaacacaatgtctatgtgcatttgccatactatatccactgcgttgttggactcggaatttttgcggtgggcgctatatattggctattttgggcagcaatatttccttgggtcaggaagtatcgcctggtgcaacagacagtcattgctccggatggctggtcgaggcagatcataacccgagttcctatcggcatggaagagaaggggaaagctggactggatggtggtagaagcggctgggatggatga

SEQ ID NO: 157746 - protein, 530 aa, Ajellomyces capsulatus NAm1
MSQLPDVRSSASPFCKDISSRAVISGSTRQHRSSRNTSSVTEQCPENRRQIGVISASFLIFNRIMGTVWIMGMVIAMTGTAVYLEFGTTIPRNGGEKNYLEYVYTKPKFLVTAMFASYALFLGWAAGNSVAFGEYVLHAADIEVNRWNQRGIGFACITLAFLIHATAVKWGLRLQNLLGALKFLVILIIVVGGAVALGGHLTMEKPDNFSRPFEGSIPSVYGIVTALYSVIWSYVGYSNANYSLSETRNPARTLKIAAPIGVGLASVLYMLVNVAYFAVVPKQEILGSGRILAASFFRNVFGPKAERVLSIFIALCAFGNVQSVIFSQGRIIQELGREGVLPFSRFWASNRPFNSPAAGLFEHYLISAVVMLAPPPGDAYNFLLNLISYPLSVVNIFVSAGLLHIYMFPKSYPDWSPTVRANRLVTIFFLLSNVFLAVAPYLPPPDKEHNVYVHLPYYIHCVVGLGIFAVGAIYWLFWAAIFPWVRKYRLVQQTVIAPDGWSRQIITRVPIGMEEKGKAGLDGGRSGWDG

SEQ ID NO: 157747 - DNA, 1587 bp, Ajellomyces capsulatus NAm1
  CDS (1)..(1587)
atgggttggcttgagttctatattggtttctcaaacagtttcatttgttctgcctttctggacagacttctatatatctcctaccagttggttaacctattgttcgcttctccaactatgagcaaaaacagcttcagtgttgtccatcaggttaacgaagaagcaccggaagagaggtgcaacgtcactaacttgccgaaagcacaagatccttatcaaaccagtcctttacggcgccagataggactcacatcagccgtgtttctcattttcaattgcatgatcggtaccggaatctttgttacacccagtaaaatcttagtgctgtccggcagtgtagggttgagtttgttcctatgggttgtcggagcggtcatcactgctgcgggcatggcggtatacatggaatttggaactggcattcctcgaaacggcggggagaagaactacttggaatatgtataccgcaagccacagttcctcacatcgtgcttgtattcaacctacgtggttttgctaggtgagggagtcagatttgccggttctagacatggctgctcggcagcaaactcggtggtctttggggagtacgtcttgaatgcagcgcaggtggaggtaacccgctggaaccagcgaattatcggacttgtttgcattacatgtgcgcttctaatccacggcctggcgctgaagtggggattgtggttgcagaacattctgggtctgatcaaattccttatcatctgcttaattgttgtttccggctcggccgcacttgcgggcgcactcaaagtcgacaggcctaacaactttaagaacgcatttgaaggaaccacgtcgagtgcgtatggggtggtcaccgctctgtacaatatcgtatacagcttcttcgggtacaagagtgccaatgctgcattgagcgagacgaacaatcccgttgcgtatttcgccgcagtcccaaaggaagaaatagtttcctccggccgtgtggtagcggcatcattttttcggaatgtctttggccctcatgctgaaagagcactctccgttttcatcgcgctttcagcgtttggcaatgtcctgagtatcatgttctcacaaagccgcgtgatccaagaacttggccgggagggaatcgttccgttctctgcattcttggcgagcaataaacctttcaacgcgcctctggcggctctattcgaacactgggtgatatctgtcattatcatgctggtaccccccccgggcaatgcatttaacttgatccttcatgtagtctcctatcccctcatcataatcaacgccttcgttgccctcgccctcatccacatctacttcaaccgcaccaaatacaactggaacccaccttactccgcgtcgctgccggtagtaatcttcttcctcatcagcaacatatatctcgccatttgccccttcgtgcccccaccgacaaatgagaaagcctacggaggactcccttactacttccactgtgtcttggccattggggttgcgttcatcggtggcatctactggctcatctgggcgaaattgatgccgtggctgggcaagtatcaactggagtag

SEQ ID NO: 157748 - protein, 528 aa, Ajellomyces capsulatus NAm1
MGWLEFYIGFSNSFICSAFLDRLLYISYQLVNLLFASPTMSKNSFSVVHQVNEEAPEERCNVTNLPKAQDPYQTSPLRRQIGLTSAVFLIFNCMIGTGIFVTPSKILVLSGSVGLSLFLWVVGAVITAAGMAVYMEFGTGIPRNGGEKNYLEYVYRKPQFLTSCLYSTYVVLLGEGVRFAGSRHGCSAANSVVFGEYVLNAAQVEVTRWNQRIIGLVCITCALLIHGLALKWGLWLQNILGLIKFLIICLIVVSGSAALAGALKVDRPNNFKNAFEGTTSSAYGVVTALYNIVYSFFGYKSANAALSETNNPVAYFAAVPKEEIVSSGRVVAASFFRNVFGPHAERALSVFIALSAFGNVLSIMFSQSRVIQELGREGIVPFSAFLASNKPFNAPLAALFEHWVISVIIMLVPPPGNAFNLILHVVSYPLIIINAFVALALIHIYFNRTKYNWNPPYSASLPVVIFFLISNIYLAICPFVPPPTNEKAYGGLPYYFHCVLAIGVAFIGGIYWLIWAKLMPWLGKYQLE

SEQ ID NO: 157749 - DNA, 1611 bp, Botryotinia fuckeliana B05.10
  CDS (1)..(1611)
atgagagactattcgaataacgcatcgagtcctaaatatggcggtacggatcaagttagcgagacccccaagacgggagttggaacacaaagcaatttcagtcaagaagaaggagaatccgcttatcaaactaatgatgcgcgccgtcaaattggccccatttccgccattttcttgatcttcaatcgcatgatcggaaccggaatcttctcgaccccaagtaccattgttgcactttccggatctgttgggctagcactatttatctgggttgcaggtatgctgattgcagcagctggtcttgcaacatatatggaatttggtaccggacttccacgaaacggtggcgaaaagaactatctcgaatatgtattccgaaagcctaagtttctcgtcactagtatgtatgctatgtatgtagtactactcggttgggcgggttcgaattccgtggtatttggggagtatattttgagtgccgccgaagttgaggtaactcgttggaatcaacgtggagtaggattggcctgtatcacagccgctttcttgatccatgggttttctgtaaaatggggattgagacttcaaaatcttttgggtgttatcaagcttctaattcttctcctgatcatcatctcgggctttgttgcgcttggtggccatctcagaatcgagaagccaaacaattttaccaatgcttttgagggaacgactggtagcgcctacggagttgtcacagctctgtacaacgtcatctggagttatatcggctatagcaatgccaattatgcactttccgaaaccaaaaatccggtcagaacactcaagatggccgcgcctacagctctcgctatagtcggcgtgctttatatgcttgcaaacattgcatattttgccgctgtaccaaaggaggaaatcatgacttcgggtcgtattttggctgcttcatttttcagaaacatgtttggatcccgtgccgaacgtgtattgtctgttttcgttgccctttcagcatttgggaatgtcctgagtgtcatattctcccaaggcagaattgtacaagaaattggccgagaaggaatcttgccattctcccgactttgggcaagtaacaagccttttaacacaccattcatgggccttttcgaacattggctggtgtctgtgatcattatgttagctcctccacctggagatgcttacaactttattctgaatgttatctcatacccacttgcggtagtaaacgtctttgtatctctagctttgcttatcctttatgctcgaccattcgcagctgatcgccatccacaacattgggccccgcctttccgtgctacttggcctgtggttttattcttccttctctcgaatgtctaccttgtcgttgcaccatttgttccacccgatgagggacaaaatgtatacgagagtttgccatattaccttcattgtgttgtgggtattgcattcttcggcgcgggagctatttactggttgatttgggctcaaatactacccagaattggtggatataaactcgttcgagagaatatcgttactgatgatggatggagtggaagtgtcttcagaagggtcaaatcagaatag

SEQ ID NO: 157750 - protein, 536 aa, Botryotinia fuckeliana B05.10
MRDYSNNASSPKYGGTDQVSETPKTGVGTQSNFSQEEGESAYQTNDARRQIGPISAIFLIFNRMIGTGIFSTPSTIVALSGSVGLALFIWVAGMLIAAAGLATYMEFGTGLPRNGGEKNYLEYVFRKPKFLVTSMYAMYVVLLGWAGSNSVVFGEYILSAAEVEVTRWNQRGVGLACITAAFLIHGFSVKWGLRLQNLLGVIKLLILLLIIISGFVALGGHLRIEKPNNFTNAFEGTTGSAYGVVTALYNVIWSYIGYSNANYALSETKNPVRTLKMAAPTALAIVGVLYMLANIAYFAAVPKEEIMTSGRILAASFFRNMFGSRAERVLSVFVALSAFGNVLSVIFSQGRIVQEIGREGILPFSRLWASNKPFNTPFMGLFEHWLVSVIIMLAPPPGDAYNFILNVISYPLAVVNVFVSLALLILYARPFAADRHPQHWAPPFRATWPVVLFFLLSNVYLVVAPFVPPDEGQNVYESLPYYLHCVVGIAFFGAGAIYWLIWAQILPRIGGYKLVRENIVTDDGWSGSVFRRVKSE

SEQ ID NO: 157751 - DNA, 1584 bp, Sclerotinia sclerotiorum 1980
  CDS (1)..(1584)
atgagagaccattcgaaaggctcactgagtcctcctagatatggcagtacggaccaagttggaaaggatgccaagatagaagaagatggatcagcatatcggacaaatgactcgcgccgtcaaattggccccatttccgccatatttctgatcttcaatcgcatgatcggaaccggaatcttctcaactccaagtaccattcttgcactttctggatctgttggccttactcttttcatttgggttgcaggtatggtgattgcggctgccggtcttgcgacatatatggaattcggtactgggcttccacggaacggtggtgaaaaaaattatcttgaatatgtttttcgaaagcccagattcctcgtcacgagtatgtatgcaatgtatgtcgtgctactcggatgggcgggttcgaactctgtggtatttggtgaatacatcctcagtgcagcagaagtcgaggtaactcgttggaatcagcgtggtgtcggagtggcttgtatcactgccgcttttctgatccatggattctcagtaaaatgggggttgagactccagaaccttttaggtgtcataaagcttctgattcttctcttgatcatcatatcgggtttcgtcgcgcttggcggccatttgaaagttgaaaagccgaacaatttcacaaatgcattcgaaggaacgactggtagcgcttatggagttgtcacagctctgtataacgttatttggagttatattggctacagcaatgccaactacgcgctctccgaaaccaaaaatccagtcaagaccctcaaaatggctgcaccgacggctctggctattgttggagtactttacatgcttgcgaatattgcatattttgctgccgtgccaaaggaagaaatcatgacatcgggtcgtattctggctgcttcatttttcaggaacatgtttggaccccgtgccgagcgtgtgttatccgtttttgtcgccctctcagcttttggaaatgtcctcagtgtcatcttttcccaaggcagaattgtacaggaaatcgcccgagaaggcattttgccattctccaggctttgggcaagtaacaagcctttcaacactccattcatgggactcttcgaacattggcttgtctctgtagtcattatgctggctccaccaccaggagatgcctacaatttcatcctgaacgtaatctcatatccacttgcggtgataaatgtcttcgtatcactagctttgctcatcctttacgttcgaccattctcaggggatcgccatccacaacactgggccccacctttccgtgccacttggccggtggtgctgtttttcctcctctccaacgtctacctggtcattgcaccatttgtcccacctagtgctggccaaaatgtgtacaagagcttgccatattacctccactgtgttgtcgggattgcgttcttcggcgcaggagctatctattggttgatctgggctcacattttacccagaattggtggatacaggctcatccgcgagcatattgtaacagatgatggatggagtggaagtgtttttagaagggtaaaacgagaatag

SEQ ID NO: 157752 - protein, 527 aa, Sclerotinia sclerotiorum 1980
MRDHSKGSLSPPRYGSTDQVGKDAKIEEDGSAYRTNDSRRQIGPISAIFLIFNRMIGTGIFSTPSTILALSGSVGLTLFIWVAGMVIAAAGLATYMEFGTGLPRNGGEKNYLEYVFRKPRFLVTSMYAMYVVLLGWAGSNSVVFGEYILSAAEVEVTRWNQRGVGVACITAAFLIHGFSVKWGLRLQNLLGVIKLLILLLIIISGFVALGGHLKVEKPNNFTNAFEGTTGSAYGVVTALYNVIWSYIGYSNANYALSETKNPVKTLKMAAPTALAIVGVLYMLANIAYFAAVPKEEIMTSGRILAASFFRNMFGPRAERVLSVFVALSAFGNVLSVIFSQGRIVQEIAREGILPFSRLWASNKPFNTPFMGLFEHWLVSVVIMLAPPPGDAYNFILNVISYPLAVINVFVSLALLILYVRPFSGDRHPQHWAPPFRATWPVVLFFLLSNVYLVIAPFVPPSAGQNVYKSLPYYLHCVVGIAFFGAGAIYWLIWAHILPRIGGYRLIREHIVTDDGWSGSVFRRVKRE

SEQ ID NO: 157753 - DNA, 1761 bp, Vanderwaltozyma polyspora DSM 70294
  CDS (1)..(1761)
atgtcggattctaaaaggtcctttgtctcacaattaaatatattcaataaggaaaattattccttctctacatcatctgcgaaggtagaaccaactgtttcaaatgatcagaattcagacgtcgaggctggtcaacaatttgttactcaattagatcaaggtgaaaaaagattaggtctattctcatgtatcggtttgatttgtaatagaatgctgggtaccggtgtctttgccgtttcttctacaatttatactttatctggttctattgggttatcgttaatcttatgggctattggtgccatcatcgctacctctggtttgtatgtctatatggaatttggtactgcaattccaaaaaatggtggtgaaaaaaattatttagaaatgatctttaagaaacccaaatttttgattacttcaatgtatgcatcgtatgttttcttcctaggttgggctgctggtaattccgtcaatactgcagtcatgtttttaactgccggtgaagttacaattaccacatggaatcaaagaggtctagcttgcgctgttgtctgctttgcattcttagtcaactctttaagtgttaaaactggtttatacattcaaaactgtttgggtattttcaaaattgtcatcgttatattcatctctatcaccggttgggttgcacttggtggtggtttaaagcatggttacaagactgacaatttccacaatgcttttgaaggtactgaaaatgctaccgcttatggtatcgttaatgcattatataacgttatttggtcctttgttggttactcaaatgtgaactacgccttgggtgaagttaaagatcctgttagaactttgaaaattgctggtccaacttcaatggtcttcgttgctattatttatatcttcgttaatatcgcttacttcgctgtcgttccaaaggaaactttgagaagctctaagttgattttggctgctgacttttttgatattgtttttggttctagtggtaaaaaggcagcctctgccatcgttggtttaagtgctttgggtaatgtcatggctgtcgtcttctcacagggtagaatcattcaacaattaggtcgtgaaggtgttttgccattctcaagtttctttgccagttccaagcctttgaactcaccaatggttggtctattccaacatttcatcgtctgtgttgttacaattttggctcctccaccaggtgatgcttataacttcattttgaacttgatttcttacccaatgaatattgtcaatttggctgtcagttgtggtttgttatggatctactggcaacgtagaaagggccttatcgaatggaaccctccaatcaaggctggtgtcattgttacttctttctttgctttatccaacttatatttggtcgttgctccatacgttccaccaaccaatggtgaatctgtgtatcaacatttgccttactggattcactgtgttatcgcttggctggtctttggtatcggtgccttatactactgtgtctggactcaaatattaccaagagtcttcaaatacaaattggtcaccaaggatattcttggtgaagatggattctggagaaatgagattattaaggtatatgataaagatataagagatgacagcgaaaaggaagataacgactcacagaacgatgttatctacgaaacagaaaatggggaattatccaaagttaacattaataataaagttagcaatccaacaacaagtaattccgattaa

SEQ ID NO: 157754 - protein, 586 aa, Vanderwaltozyma polyspora DSM 70294
MSDSKRSFVSQLNIFNKENYSFSTSSAKVEPTVSNDQNSDVEAGQQFVTQLDQGEKRLGLFSCIGLICNRMLGTGVFAVSSTIYTLSGSIGLSLILWAIGAIIATSGLYVYMEFGTAIPKNGGEKNYLEMIFKKPKFLITSMYASYVFFLGWAAGNSVNTAVMFLTAGEVTITTWNQRGLACAVVCFAFLVNSLSVKTGLYIQNCLGIFKIVIVIFISITGWVALGGGLKHGYKTDNFHNAFEGTENATAYGIVNALYNVIWSFVGYSNVNYALGEVKDPVRTLKIAGPTSMVFVAIIYIFVNIAYFAVVPKETLRSSKLILAADFFDIVFGSSGKKAASAIVGLSALGNVMAVVFSQGRIIQQLGREGVLPFSSFFASSKPLNSPMVGLFQHFIVCVVTILAPPPGDAYNFILNLISYPMNIVNLAVSCGLLWIYWQRRKGLIEWNPPIKAGVIVTSFFALSNLYLVVAPYVPPTNGESVYQHLPYWIHCVIAWLVFGIGALYYCVWTQILPRVFKYKLVTKDILGEDGFWRNEIIKVYDKDIRDDSEKEDNDSQNDVIYETENGELSKVNINNKVSNPTTSNSD

SEQ ID NO: 157755 - DNA, 1668 bp, Malassezia globosa CBS 7966
  CDS (1)..(1668)
atggtagattcttctcccatcaaagaggagaagcactttatcaccgaggacagcaccctcgttgatggccacatagacgaagagtctcgacctgtgaatgcgacggaagactcacaaacaggtcatcacgaagatattccgcctgctgaggtacactatgatgaactgccacagggaagacagcttggcacgatctctgctatcttcttgatggtaaatcgaattcttggtactggtgtgttctctacgacatcaacgatcctccagcagggcggcagtgttggtatgagtctcatctattgggttatcggcggtttaattgctggttgcggctttgctgtgtatgcggaattcgccacggccatgcatcgaaatggtggtgaactgaactacctgcagcacgtgtatcgtaagccgaaacatatggttgcttccatgtatgcagcgcaggccttactactcggtcaggcagctggtaatgccaatgctgctggtcagtactttattcgagctggtggtaaaagtgcatcggaatggggctccaaaggcattggcattggcattatcatgtttgccctattcatgcacggcactatgctcaagtggggtctgctcttccagaacactgtcggtcttttcaaggtggttatcctgctgctcattgtatttgctgggttcgccgcacttgcgggccacacaaagggccctacaccacataacttttcgaatgcttttgacaacacacgaagcgatatctacggtgtatcgcagtgcatttacaatgccatttggagttatgttggatattcgaatttgttctatgcactcggcgaggtccagaatccggcacgcacgatgaagatcgccggcatcgtttctttgacaacactgaccattctttatgtgctgtgccaaattgcttactttgctgctgtgccgctggatgaagtcctcggcagtgaacagattattgccgcggccttttttaaacacatgtttggcgagcgctcggcacaggccctgtcagtatttgtggcactctctgctgttgcgaatgtgtttgctgttttgtttgctcagggtcgattgaatcaagcgttaggtcgtgacaacatcattccctttgccaaaatatttgcgtctaatcggcccttcaacacgccactagcagggctcacgtggcacgctattgtgacactgattcttatgcttgcaccaccccaagattctgcgtatcagctggtgctgagtatcgcacaatacccacttaacattgtgaatacggcggtaggtctgggattgtgcctgacatacttgccgcacaactcgcggttcaaactctcgtggcttcgggagtggcacccgctgtttcgagcgtcgttcccgatagcgctcttctttacactcgtctctcttttcttggtcattgtgccgtggattccgccgccagctggcgaaaaaaccgccaccaacggcgacatctggtatggcttggcacctgcagtagcctcgggcttctttggcgctggatttttgtactggtttgtctggtatgtcatgatgccaaggatcggcaagtacaagctggtcgaaaggcaaacgacaatgaaggatggcacgcccgtgatggcatttgaccacgtgcctcgcgcctcccttccaaaataa

SEQ ID NO: 157756 - protein, 555 aa, Malassezia globosa CBS 7966
MVDSSPIKEEKHFITEDSTLVDGHIDEESRPVNATEDSQTGHHEDIPPAEVHYDELPQGRQLGTISAIFLMVNRILGTGVFSTTSTILQQGGSVGMSLIYWVIGGLIAGCGFAVYAEFATAMHRNGGELNYLQHVYRKPKHMVASMYAAQALLLGQAAGNANAAGQYFIRAGGKSASEWGSKGIGIGIIMFALFMHGTMLKWGLLFQNTVGLFKVVILLLIVFAGFAALAGHTKGPTPHNFSNAFDNTRSDIYGVSQCIYNAIWSYVGYSNLFYALGEVQNPARTMKIAGIVSLTTLTILYVLCQIAYFAAVPLDEVLGSEQIIAAAFFKHMFGERSAQALSVFVALSAVANVFAVLFAQGRLNQALGRDNIIPFAKIFASNRPFNTPLAGLTWHAIVTLILMLAPPQDSAYQLVLSIAQYPLNIVNTAVGLGLCLTYLPHNSRFKLSWLREWHPLFRASFPIALFFTLVSLFLVIVPWIPPPAGEKTATNGDIWYGLAPAVASGFFGAGFLYWFVWYVMMPRIGKYKLVERQTTMKDGTPVMAFDHVPRASLPK

SEQ ID NO: 157757 - DNA, 1605 bp, Phaeosphaeria nodorum SN15
  CDS (1)..(1605)
atgagtgcgaaacatgacgacgacaccaaggtcgtaagggctgtcgacactgaaggctcgccgtcgccgcccacatacgatggcgcaagcgtgcaagacgatcaggcgtatgtctacgatgaatcgcagaaacttggatacactgcgactgtcttcgtcatcttgaacaagatgattggtaccggaatcttttctactccctctggtatttttgcaattactggctcggtcggagtgtctctcttcctatggatcatcggcggtttcctgaccttctgcggtctctccgtattcatggagtttggccttgccatcccacgatctggaggcgagaagaactacctcgagcgtgtgtaccgtcaccccaagtacatggcgacatgtgttctcgctgcgcaaatgcttttgcttgggttctcctctggcaacagtcttgctttcggccgctatgtgctcttcgcttcaggatctgagtcacccgacggatgggctgcacgtggcattgccatcgcttgtgttaccttctcggtcggactgcactctgttgctccaaagtggggcattcgtctcttcaccgtgctcggattcttcaaggtcttcattctcttcttcatcgtcttctccggctttgctgcgctagctggccatcttaagattgatcaaccgcacaactttgacaatgcatttgccctcgagatcggtgacggatatggcggtggcggagcttatggatactgccaggcgttgctccgcatcgtgtactcatacaaaggatgggagaatgccaactacgtcctcggcgagatccgcaaccccaaaaagacattggcttggtctgctcccctagccatcggaggaaccaccattctctacgtcctcgtgaacgtcgcatactttgccgccattcccaagtcggatcttgcaaagagcgaagttatcgtcgcaggtctctttttccgcaacgtctttggcaacagcgccggcgcacgcagcttacccgcctttgtcgcactgagtaacttgggcaacgtcctcgccgtcagtttcgcacacgcccgcctgaaccaggaatttgcaaaggaaggtcttctgccctggtctcgcttctgggcttcgatgaagccattcaacgcacctgcgccagcactcttcctgcactggctcatcaccgtcatcgtgcttgtcgcacctccagctggccctgcgtacaacttcatcacggatctgtacacgtaccctggcgcctggatcaacggattcgtcgccgctggactgatttacctgcaattcaagaagagcgagcaatggtcgtcaccatggcacacgttccttccgatttctgtcatctacttgctggcgaacgttttcctcgcgctcgtgccatttattcctccggatggtgatcgcaacgctgagggctatccatggattgtgttccccgtggttggtgtgggtgttttgctgcttggagtggtgtactgggcttgctggacaaaggtgtggcccaagattggcgggtacaagattgtcagcgagaggtatgaagactcgcagggcaacgagcatattcgctatgtcaagctgtatgcgaacaagcaacactag

SEQ ID NO: 157758 - protein, 534 aa, Phaeosphaeria nodorum SN15
MSAKHDDDTKVVRAVDTEGSPSPPTYDGASVQDDQAYVYDESQKLGYTATVFVILNKMIGTGIFSTPSGIFAITGSVGVSLFLWIIGGFLTFCGLSVFMEFGLAIPRSGGEKNYLERVYRHPKYMATCVLAAQMLLLGFSSGNSLAFGRYVLFASGSESPDGWAARGIAIACVTFSVGLHSVAPKWGIRLFTVLGFFKVFILFFIVFSGFAALAGHLKIDQPHNFDNAFALEIGDGYGGGGAYGYCQALLRIVYSYKGWENANYVLGEIRNPKKTLAWSAPLAIGGTTILYVLVNVAYFAAIPKSDLAKSEVIVAGLFFRNVFGNSAGARSLPAFVALSNLGNVLAVSFAHARLNQEFAKEGLLPWSRFWASMKPFNAPAPALFLHWLITVIVLVAPPAGPAYNFITDLYTYPGAWINGFVAAGLIYLQFKKSEQWSSPWHTFLPISVIYLLANVFLALVPFIPPDGDRNAEGYPWIVFPVVGVGVLLLGVVYWACWTKVWPKIGGYKIVSERYEDSQGNEHIRYVKLYANKQH

SEQ ID NO: 157759 - DNA, 1608 bp, Aspergillus oryzae RIB40
  CDS (1)..(1608)
atgccggacacaaaggccctggaagaagggccccggagggccgatggtgtctctcagctatatgagggcaatgtcttcgacgcaacacctgaagaccgccggcaaattggcgtggttagcgcctcgttcctgatcttcaacagagtcattggaactggtatctttgctacgccaagtactatcctgtcgttggccggtagtgttggactttccctgttcatgtgggtgattggcactgtcattgccatggccggtaccgccgtgtacctggaatggggtactgctatcccgaagaacggtggtgaaaagaactatcttgaatatgtcttcaagaagcccaagttcctcataacatgcatgtatgcttcttacgtcatgttacttggctgggctgcgagcaacagtgtggtgttcggcgagtacatcctcaatgccgctgatgtcgaggtcgaccgttggaaccaacgtggcattgggttggcctgtatctctgctgctttcctcattcatgccttcgccttgaagtggggtcttcatctccaaaacttccttggtgtggtcaagcttgtcatcatcgtgttcgtcgtcgtctgtgggtttgttgccctcggaggtcatatgaagatcgataacccccctcacaacttccggaatgcctttgaaggcacaacgaatagcggttatggaatcgtcatgtcactatataacgtcatctggtcatttatcggctactcgaatgccaactacgctttgagtgagaccaagaaccccacacgcacattgaagatcgccgcgccaattgccatcggatccgttggagtcctttacatgctctgcaacatcgcttatttcgccgccgtccctcgagaacagtttcttagttctggccagactgtcgccgccgtctttttcggtaacatgtttggaccgagggcagagaaggtcatgtcggtcttcgtcgccttatcagcatttggcaatgtcttgtcggtgatcttctctcaaggtcgcatcgtccaagagctgggacgtgagggtgtcctgcctctctcgaagtttttcgctagcaacaagccacttaatgcgccggccgctggtctgtttgagcactacatcgtctcgatcatcatcttactggctccccctcccggagacgcttataacttcttggtcaacctgatttcgtacccgctcgccatcatcaacgtctttgtatctggtggcctcgtttatgtctacttcacccacaagacgaagttccccgactggaaccctggtatccgcgccacacttcccgtgaccatcttcttctgcttgtccaacgtgtatctggtggtggcgccgtacgtgcccccaagtgccggacagagcgtctacgaggaactcccatactacctgcactgtgtggtggccctgggaatcttcgcagccggtggaatctattacctcgtgtgggccgttttgctcccacgcttgggcaactatgtgctggtcaaggaaaccgtggtggatgctgacggctggtctcggagtgtcatctcacgtctcccgttggcggaagctgaaattcgtcaagcgcaatggcaacaggagcaacagcactcctaa

SEQ ID NO: 157760 - protein, 535 aa, Aspergillus oryzae RIB40
MPDTKALEEGPRRADGVSQLYEGNVFDATPEDRRQIGVVSASFLIFNRVIGTGIFATPSTILSLAGSVGLSLFMWVIGTVIAMAGTAVYLEWGTAIPKNGGEKNYLEYVFKKPKFLITCMYASYVMLLGWAASNSVVFGEYILNAADVEVDRWNQRGIGLACISAAFLIHAFALKWGLHLQNFLGVVKLVIIVFVVVCGFVALGGHMKIDNPPHNFRNAFEGTTNSGYGIVMSLYNVIWSFIGYSNANYALSETKNPTRTLKIAAPIAIGSVGVLYMLCNIAYFAAVPREQFLSSGQTVAAVFFGNMFGPRAEKVMSVFVALSAFGNVLSVIFSQGRIVQELGREGVLPLSKFFASNKPLNAPAAGLFEHYIVSIIILLAPPPGDAYNFLVNLISYPLAIINVFVSGGLVYVYFTHKTKFPDWNPGIRATLPVTIFFCLSNVYLVVAPYVPPSAGQSVYEELPYYLHCVVALGIFAAGGIYYLVWAVLLPRLGNYVLVKETVVDADGWSRSVISRLPLAEAEIRQAQWQQEQQHS

SEQ ID NO: 157761 - DNA, 1614 bp, Coprinopsis cinerea okayama7#130
  CDS (1)..(1614)
atgaagggcgttccaaatgggttctatgatggagagtttaaagatgtgaagaagggcgatgattcttcggtcatcgacgagcccaagggcacccccgcggaggttgacgtcaagagcagcgatggctctttcaagttcgagcaaggagacgactcgacagatcccaaccgaaggcaaattggcctagtctctgccattttcattattttcaacagaatcatcggtactggcgtcttcgcaacaccgagtacgattcttggcctcagtgggagtgtaggcctcgctctgtttatgtgggtcatcggagcaatcattgctgctgccggtatgcatgtctatattgtatggggttcggcgattcccagaaatggaggcgagaagaactatttggagtatctcttcaggaaaccaaaatacctcattacgtccatgttcgcagcaaatggtgttcttcttgcctgggctgccggaaactctcttgtctttggcgaatacatccttcgagccgccaatgctgaccctacgcggtggaaactccgagctgtcggtttcgcctgcctcacattcgccttccttattcacggtaccgcgttgaaatggggcctccgccttcaaaacttcttgggtatcttcaaggtcctggtcctcatcttcgtcattatcaccggtttcgtggccctcggtggacacatgaaggttcccaagcccaacaacttctccaatgcgttcgagggtacaaccgctagcgccagctctttctgcctgagcttgtacaatgttatctggtcgtatattggattcagcaacgtcaattacgctctttctgaagtcaggaaccctcaacgcaccatccgcatcgcaggtcccttggccattggcttcatcaccatcctctacatcctcgccaatatcgcctactttgccgctgcgaccaaggaggagattacaggctctggtcggctcgtcgctgctctcctattcgagaatgtctatggcgagaaagcgactcgtgctctgtcggtgtttgtcgccctttctgcccttggaaacgtcctctccgttgtcttctcccaaggtcgtgtaaaccaggagctcggacgagagggtatccttccattcagcaagttctggggctccaaccgaccattcaatgcgcctttggtcggtctcggtcttcactgggtcgtctgcttgatcgtcatcttcgccctccctcccggggacgcctacaacttcgtcctcaacgtcatctcataccccctctccgtcatcaacgccgccatctccttcggaatcgtctacctccacttccgaccgtaccatgactggcccggtgtgcccatctggggcttgatcacctctgccttcttcggcgccgccaacgtgttcttgttcatcgttcccctcacccgacctccaccaggcgccgaaccctacgaatccctcccctactggacacacgctgtggccggatgggctgtgtttggactcggattggtgtactggatcatttgggcacgtatccttcccaaggtgctgggatacaaactcgtgcgagtggaggaagtcgggaaggatggtcttgttcgtcacgtattccagtggaggcggtga

SEQ ID NO: 157762 - protein, 537 aa, Coprinopsis cinerea okayama7#130
MKGVPNGFYDGEFKDVKKGDDSSVIDEPKGTPAEVDVKSSDGSFKFEQGDDSTDPNRRQIGLVSAIFIIFNRIIGTGVFATPSTILGLSGSVGLALFMWVIGAIIAAAGMHVYIVWGSAIPRNGGEKNYLEYLFRKPKYLITSMFAANGVLLAWAAGNSLVFGEYILRAANADPTRWKLRAVGFACLTFAFLIHGTALKWGLRLQNFLGIFKVLVLIFVIITGFVALGGHMKVPKPNNFSNAFEGTTASASSFCLSLYNVIWSYIGFSNVNYALSEVRNPQRTIRIAGPLAIGFITILYILANIAYFAAATKEEITGSGRLVAALLFENVYGEKATRALSVFVALSALGNVLSVVFSQGRVNQELGREGILPFSKFWGSNRPFNAPLVGLGLHWVVCLIVIFALPPGDAYNFVLNVISYPLSVINAAISFGIVYLHFRPYHDWPGVPIWGLITSAFFGAANVFLFIVPLTRPPPGAEPYESLPYWTHAVAGWAVFGLGLVYWIIWARILPKVLGYKLVRVEEVGKDGLVRHVFQWRR

SEQ ID NO: 157763 - DNA, 1803 bp, Laccaria bicolor S238N-H82
  CDS (1)..(1803)
atgcccctcctccgtatactgggcagaaaaccgacgcaagtttctaatactacgaatgcagcggaggtcgatgctttcaaagacaaacagggtcatccgagttttgccactgagaagatcgtcataggggaggatacgccaagcgtttactcaagggaagtaacgacaacaaaggacccgtcactcaacccgggtgctctttcttttgaagaagatgccgctgggggaatgggccgccacttgggcgtcttcagttgcaccatgctcattgttggccgtatcataggaactggaatattctcaaccccttcctctatcctctcctctgtaggctctgtaggtgcctccctgatgctctgggtacttggatttttgctctccttctgcggcttgttcgtttggttggagtatgggaccatgttccctcgctcaggtggtgagaaggtgtatttggaggcggtttataagagaccaaaatacctggcgacggttatatttgcaatgaacgcgattgtattggggtttactgcttcaggatgcattatcttcgcgaataacattctaattgctgcaggccatgtcgccgatagatgggtagtacgtgggatcgcgttgggcgtcatttgttttgtcactctccttcacggattaacgcccaaaactggggtattccttatgaatgcactcagcgtcttcaagattttcctcctcctttttgtcgtgatttcaggttgggtcgtgctctccgggaaaacgcacatcaaagatcctcaaactaacttccgcaatgcattttcgggaagctcgcgcagcagtaacgattacgcaacggccaccttcaaggtcctcaacgcgtatgcgggctggtcaaatattaactacgtgatgaacaacgtcaaaaacccagtgcggacactgaagatcgctggtccgcttggactaggaatctgtgcggttttgtatatgttggccaacgtagcttattttgccgccgcaacgaaagatgagatacgcaagtctggtgtcactgttgctgctctgttcttcaagaatgtctttggtaccaaggcagagagagcgctttcggtcttcgtggctctaagcgccttgggcaacgtaatcactgttaccttcgccgcctgtcgtataaaccaagaactggcaaaagaaggcgttccccttccctttggaaataaattctgggcgtcaaattggccaacaggcaaatccccattgcctggcctcatcattcatctgataccttccataattattatcatcgctcccccgcccgcgattgtctacccattcatcttggacgtagaaggatatccacagcagatttttaatcttttcattgttgttggtctcttttggctccggtggaagaagccagatgcagtccgtccattcaagggtaagagttgtatatggtgtcaagaccccagctggctgcctttatcttatcgcgcttttcagtttggataccattcgcattactcttcttggttgcagccgttttctgtaagcgtctctcctcctgacggctcaagttcgtttacaaatggcatattagtgctcgtcgctccattcctccggcccgcaaatcgtgtgggagatacacccccgttgccatactacttatactgccttgtcggaatcgggatcatgtttcttggagttgtgtattgggctgtgtggcgaatttttttgcccaggatatttggctataaattggtcccggagaaagacacacttgatgacgggactgttgtcaccgtgttctctcgaaagaaaatatag

SEQ ID NO: 157764 - protein, 600 aa, Laccaria bicolor S238N-H82
MPLLRILGRKPTQVSNTTNAAEVDAFKDKQGHPSFATEKIVIGEDTPSVYSREVTTTKDPSLNPGALSFEEDAAGGMGRHLGVFSCTMLIVGRIIGTGIFSTPSSILSSVGSVGASLMLWVLGFLLSFCGLFVWLEYGTMFPRSGGEKVYLEAVYKRPKYLATVIFAMNAIVLGFTASGCIIFANNILIAAGHVADRWVVRGIALGVICFVTLLHGLTPKTGVFLMNALSVFKIFLLLFVVISGWVVLSGKTHIKDPQTNFRNAFSGSSRSSNDYATATFKVLNAYAGWSNINYVMNNVKNPVRTLKIAGPLGLGICAVLYMLANVAYFAAATKDEIRKSGVTVAALFFKNVFGTKAERALSVFVALSALGNVITVTFAACRINQELAKEGVPLPFGNKFWASNWPTGKSPLPGLIIHLIPSIIIIIAPPPAIVYPFILDVEGYPQQIFNLFIVVGLFWLRWKKPDAVRPFKGKSCIWCQDPSWLPLSYRAFQFGYHSHYSSWLQPFSVSVSPPDGSSSFTNGILVLVAPFLRPANRVGDTPPLPYYLYCLVGIGIMFLGVVYWAVWRIFLPRIFGYKLVPEKDTLDDGTVVTVFSRKKI

SEQ ID NO: 157765 - DNA, 1548 bp, Laccaria bicolor S238N-H82
  CDS (1)..(1548)
atgtatctaatagtccttccagagcaccatggtgaagaattcgataatgtccctacgacaaaacgacaacttggcctcttcagcgccgcttttctcattttcaatcgcgtcatagggactggcatctacgcaactccaagcaatattctacgcgcctccggcagtgtcggcgtcgctttgatcatgtggcttgtcggagcgattattgccgcatgcgggaccaacgtttacattgaattggggactggaatacctagaagcggaggagagaagaactatctagagtttatctatcgcagaccaagattcatggccgcgtctattttcaccgtatacgccctcataatgggaacggcgagcgcgaacagtgtcgtctttagcgaatacctcctccattcgatgtcgtttcccccatcacgcctcaacactcgcttagtcgccttcctttgcctaacattcatcttcctaattcacgggaccctcctcaaatggggtctaaggcttcaaaacaccctggccgttttcaaactcgtcgttctgactctgatagctttggcagggattttttgtttattcggcgtccctggcttcgccgtgcgtgtaggatatcagcaacctcacaatttcgaatggaacaacttctgggagggaagtggtaccggagcgaatgcatttgtaagtgggctatataacgtcatttggtcgttcatcggatactcaaatgcaaattatgccctttccgaggtaaagaaccccgttaagaccctcaaacgtgccgctcctctggccatgttcttcgtgacttccgtctatctcctcattaatgttgcctattttgcggtggtgtcgaagactgatattttagaaagcaaacacattgtagccgccctgtttttccgaaatttatttggtccgactacggagaaggctctcagcgcgttcatcgcgctatcaacgttaggcaacctgctctctggacaattctcgcaaggaagagtaatccaggaactcggacgtgaagggatattaccatattcctcaatattcgcaagcaacaaaccattcggggctcctttctccggcctcttgatgcaatatttggtctcgtgcacgtttcttctcgccgtaccacccggagacgtatatctcttcttgatcagtctatcgtcgtattccgcctcactagtcaacgctctcgtcgcattcgggctccttttgctatacacaaattcctaccgaagctgggactggaatccgcctttccgagcgcccaaactcctcgtcatggtctttttcatttcaaacatctttttaatcgcggttccatttattccgccaacgtcagggtctaaaacgtatgagacgcttccgtattggtctcattctgtcggtgcattctccgtctccctcgtcggcattggatattggtatatttggagtgtgtggctacccaataggaatgggtataccctcgagagggattggactctccaggatgatggtgtaccgaggtggacgttccgtaaagttcctgtactggggcgatag

SEQ ID NO: 157766 - protein, 515 aa, Laccaria bicolor S238N-H82
MYLIVLPEHHGEEFDNVPTTKRQLGLFSAAFLIFNRVIGTGIYATPSNILRASGSVGVALIMWLVGAIIAACGTNVYIELGTGIPRSGGEKNYLEFIYRRPRFMAASIFTVYALIMGTASANSVVFSEYLLHSMSFPPSRLNTRLVAFLCLTFIFLIHGTLLKWGLRLQNTLAVFKLVVLTLIALAGIFCLFGVPGFAVRVGYQQPHNFEWNNFWEGSGTGANAFVSGLYNVIWSFIGYSNANYALSEVKNPVKTLKRAAPLAMFFVTSVYLLINVAYFAVVSKTDILESKHIVAALFFRNLFGPTTEKALSAFIALSTLGNLLSGQFSQGRVIQELGREGILPYSSIFASNKPFGAPFSGLLMQYLVSCTFLLAVPPGDVYLFLISLSSYSASLVNALVAFGLLLLYTNSYRSWDWNPPFRAPKLLVMVFFISNIFLIAVPFIPPTSGSKTYETLPYWSHSVGAFSVSLVGIGYWYIWSVWLPNRNGYTLERDWTLQDDGVPRWTFRKVPVLGR

SEQ ID NO: 157767 - DNA, 1602 bp, Pyrenophora tritici-repentis Pt-1C-BFP
  CDS (1)..(1602)
atggcgactacattggacgacgatgcaaaggttgcgcggtacactaacaacgaaacgtcgccccctcccccgatttacgaagacggcagcgtacaagacgataatgcgtacgtctacgatgactcgcagaaattgggttacacggccacggtgtttgtcatcttgaacaagatgattggtaccgggattttctcgaccccttccggtatcttcgctgtgacgggatctgttggtgtatcgctctttctctggatcattggcggagtcatcaccttctgtggactgtctgtattcctggagtttggtctcgccatcccgcggtctggtggtgagaagaactacttggagcgcgtgtatcgtcacccaaagtatgttgcgacatgtgttctcgcatcacaaatgcttctgctgggcttctcatccggcaactccttggcattcggccgctatgtattgttcgcttccggctcagaagcgcccgatggctgggcagcgcgtggtattgcagtggcatgcgtaaccttctgtgtcggcttgcattctacctttccaaagtgggggatccgcctcttcaacgtcctcggagtcttcaaagtctttatccttctcttcatcatctgttcaggctttgctgccttggcaggccatttgaagattgaacagccgcacaacttcgacaatgcgttcaagctagaaattggtgatggttatggtggtggcggtgcatacgcctactgccaagccttactgcgtattatatattcctacaagggatgggaaaatgcaaactatgtcctaggcgaaatccgcaacccgcgtaaaaccctctcctggtccgcccccctcgccgtcggcggcaccacaatcctctatgtcctcgcaaatgtcgcctacttcgccgcgattcccaaatctgacctcgcaaaatccgaagtcatagtcgccggacttttcttccgcaacgtcttcggcaacagcgccggtgcccgtagcctccccgccttcgtcgccttgagcaatctcggcaacgtcctcgccgtcagcttcgctcacgcgcgtctgaaccaggaatttgcaaaggaaggtctcattccctggagtcgtatctgggcttctaacaaacccttcaacgctcctgccgctgcactttttcttcactggctcatcaccgtcattgtacttgttgcgccccccgctggacctgcgtataacttcataacggatctttacacctaccccggcgcctggatcaacgctttcgtaaccgccggtctcatatacctgcaatacaccaagagcgaacgctgggagtcgccatggcacacctacctccccatcgccctgctgtaccttgccgcaaacgttttcctcgcgctcgtcccttttatcccgccagatggcgattggaacgcagatggatacccgtactacgtgtttcctgttgtgggtgtcggtgtgttgctgctgggcgtggtgtattgggcttgctggacaaaggtgtggccgaagtttggggggtatagaattgttagtgagaggtatgaggatgagagaggggttgagcatgttaagtatatcaaggtttacataaaaaaggactga

SEQ ID NO: 157768 - protein, 533 aa, Pyrenophora tritici-repentis Pt-1C-BFP
MATTLDDDAKVARYTNNETSPPPPIYEDGSVQDDNAYVYDDSQKLGYTATVFVILNKMIGTGIFSTPSGIFAVTGSVGVSLFLWIIGGVITFCGLSVFLEFGLAIPRSGGEKNYLERVYRHPKYVATCVLASQMLLLGFSSGNSLAFGRYVLFASGSEAPDGWAARGIAVACVTFCVGLHSTFPKWGIRLFNVLGVFKVFILLFIICSGFAALAGHLKIEQPHNFDNAFKLEIGDGYGGGGAYAYCQALLRIIYSYKGWENANYVLGEIRNPRKTLSWSAPLAVGGTTILYVLANVAYFAAIPKSDLAKSEVIVAGLFFRNVFGNSAGARSLPAFVALSNLGNVLAVSFAHARLNQEFAKEGLIPWSRIWASNKPFNAPAAALFLHWLITVIVLVAPPAGPAYNFITDLYTYPGAWINAFVTAGLIYLQYTKSERWESPWHTYLPIALLYLAANVFLALVPFIPPDGDWNADGYPYYVFPVVGVGVLLLGVVYWACWTKVWPKFGGYRIVSERYEDERGVEHVKYIKVYIKKD

SEQ ID NO: 157769 - DNA, 1644 bp, Aspergillus flavus NRRL3357
  CDS (1)..(1644)
atgagcgattcagcttcgaaatccgcaaagggagtcatgccggacacaaaggccctggaagaagggccccggagggccgatggtgtctctcagctatatgagggcaatgtcttcgacgcaacacctgaagaccgccggcaaattggcgtggttagcgcctcgttcctgatcttcaacagagtcattggaactggtatctttgctacgccaagtactatcctgtcgttggccggtagtgttggactttccctgttcatgtgggtgattggcactgtcattgccatggccggtaccgccgtgtacctggaatggggtactgctatcccgaagaacggtggtgaaaagaactatcttgaatatgtcttcaagaagcccaagttcctcataacatgcatgtatgcttcttacgtcatgttacttggctgggctgcgagcaacagtgtggtgttcggcgagtacatcctcaatgccgctgatgtcgaggtcgaccgttggaaccaacgtggcattgggttggcctgtatctctgctgctttcctcattcatgccttcgccttgaagtggggtcttcatctccaaaacttccttggtgtggtcaagcttgtcatcatcgtgttcgtcgtcgtctgtgggtttgttgccctcggaggtcatatgaagatcgataacccccctcacaacttccggaatgcttttgaaggcacaacgaatagcggttatggaatcgtcatgtcactatataacgttatctggtcatttatcggctactcgaatgccaactacgctttgagtgagaccaagaaccccacacgcacattgaagatcgccgcgccaattgccatcggatccgttggagtcctttacatgctctgcaacatcgcttatttcgccgccgtccctcgagaacagtttcttagttctggccagactgtcgccgccgtctttttcggtaacatgtttggcccgagggcagagaaggtcatgtcggtcttcgtcgccttatcagcatttggcaatgtcttgtcggtgatcttctctcaaggtcgcatcgtccaagagctgggacgtgagggtgtcctgcctctctcgaagtttttcgctagcaacaagccacttaatgcgccggccgctggtctgtttgagcactacatcgtctcgatcatcatcttactggctccccctcccggagacgcttataacttcttggtcaacctgatttcgtacccgctcgccatcatcaacgtctttgtatctggtggcctcgtttatgtctacttcacccacaagacaaagttccccgactggaaccctggtatccgcgccacacttcccgtgaccatcttcttctgcttgtccaacgtgtatctggtggtggcgccgtacgtgcccccaagtgccggacagagcgtctacgaggaactcccatactacctgcactgtgtggtggccctgggaatcttcgcagccggtggaatctattacctcgtgtgggccgttttgctcccacgcttgggcaactatgtgctggtcaaggaaaccgtggtggatgctgacggctggtctcggagtgtcatctcacgtctcccgttggcggaagctgaaattcgtcaagcgcaatggcaacaggagcaacagcactcctaa

SEQ ID NO: 157770 - protein, 547 aa, Aspergillus flavus NRRL3357
MSDSASKSAKGVMPDTKALEEGPRRADGVSQLYEGNVFDATPEDRRQIGVVSASFLIFNRVIGTGIFATPSTILSLAGSVGLSLFMWVIGTVIAMAGTAVYLEWGTAIPKNGGEKNYLEYVFKKPKFLITCMYASYVMLLGWAASNSVVFGEYILNAADVEVDRWNQRGIGLACISAAFLIHAFALKWGLHLQNFLGVVKLVIIVFVVVCGFVALGGHMKIDNPPHNFRNAFEGTTNSGYGIVMSLYNVIWSFIGYSNANYALSETKNPTRTLKIAAPIAIGSVGVLYMLCNIAYFAAVPREQFLSSGQTVAAVFFGNMFGPRAEKVMSVFVALSAFGNVLSVIFSQGRIVQELGREGVLPLSKFFASNKPLNAPAAGLFEHYIVSIIILLAPPPGDAYNFLVNLISYPLAIINVFVSGGLVYVYFTHKTKFPDWNPGIRATLPVTIFFCLSNVYLVVAPYVPPSAGQSVYEELPYYLHCVVALGIFAAGGIYYLVWAVLLPRLGNYVLVKETVVDADGWSRSVISRLPLAEAEIRQAQWQQEQQHS

SEQ ID NO: 157771 - DNA, 1623 bp, Aspergillus flavus NRRL3357
  CDS (1)..(1623)
atgagcaacacagaaatagagcccttgttggactctgctgctcctggttacgacacggtacatgacccaagttatgattctccccctgatgcgctacactcgggcttccaaaacaaattgcctgaggcgccctcccatcggaaagcgctcaactggtccagtgcatatatacttgtcatttcgcgtgtcatcgggagtggcgtgtttgcgaccccggggtcgatcgtcaagtcggcgggaagtattggactgacgttattattatggcttgtcggaaccatcttagcggcctgtggaatggctgtatcaatggaatttggatgtatgctgcctcgctccggtggggataaggtatacttggagtacgcttatcgaaggcctaagtttctcgcatctactctcatcgctgtacaagcagtactattaggcttcacggctagcaacagcattatctttgcgaaatacacactgttcgcttttaacatcgaaccgaccgagtatcaacataaggcactcgctgttggccttctaaccctcatcaccattgtccatggctgcttcctcaaaaccggaatctggatccagaatatcctaggatgggtcaaaatcttcctcatcatggccatgtctttgactggaatttgggttattcttctgcgtccctacgatgaatcgatgagtgaatccgatcgtgtggtcaccaacaacccattcgcatgggatacactgtgggaaggctccaactggagttggagcttgatttcaacgtcaatcttcaagatcttctattcatatgcgggactgaacaatgtcaacaacgtcctcaatgaagtcaaagacccgatcaagacggtgaaaacggtttgcccagcagggcttctgactgcaggcgctctttacttcctagcgaacatatcctacttccttgtagttcctcttgatgagatcaagaacagtggggaacttgttgcgggtcttctgtttgagcgactttttggggcacatgtgggccgagtgcttttcccgttggccattgctatttcggcggctggaaatgtgatggtagtgacatttgctctggctcgggtaaaccaagagattgctcgtcagggctttctaccgtggtcgcatcttctatcctcctcgcggccttttaactctcctcttgggggacttctggtacactacataccatctattcttgtgatttctctcccgcctcaaggagatgtttacaacttcatattggacgtcgagggttatcctgggcagatctttgccttggcaatcacggtcggtcttctgattgtccgacgacgagagccattccttcaccgtccattcaaggcctggacttgggcaatatggttacgtatcgtggtctgcattgctttgctggcggctcctttcttccctccgccagatcggaagggcgatgtgcatttcttctatgccacgtacgctattgttggagctggggtgattttatttggcatcgtgtattggtatatatggacagttttactaccacgatgggggaattatcaactagaagaggagaagggcgtgctcgaagatgggacgggcattacaaagcttgttcgctcgtatagaatcacctaa

SEQ ID NO: 157772 - protein, 540 aa, Aspergillus flavus NRRL3357
MSNTEIEPLLDSAAPGYDTVHDPSYDSPPDALHSGFQNKLPEAPSHRKALNWSSAYILVISRVIGSGVFATPGSIVKSAGSIGLTLLLWLVGTILAACGMAVSMEFGCMLPRSGGDKVYLEYAYRRPKFLASTLIAVQAVLLGFTASNSIIFAKYTLFAFNIEPTEYQHKALAVGLLTLITIVHGCFLKTGIWIQNILGWVKIFLIMAMSLTGIWVILLRPYDESMSESDRVVTNNPFAWDTLWEGSNWSWSLISTSIFKIFYSYAGLNNVNNVLNEVKDPIKTVKTVCPAGLLTAGALYFLANISYFLVVPLDEIKNSGELVAGLLFERLFGAHVGRVLFPLAIAISAAGNVMVVTFALARVNQEIARQGFLPWSHLLSSSRPFNSPLGGLLVHYIPSILVISLPPQGDVYNFILDVEGYPGQIFALAITVGLLIVRRREPFLHRPFKAWTWAIWLRIVVCIALLAAPFFPPPDRKGDVHFFYATYAIVGAGVILFGIVYWYIWTVLLPRWGNYQLEEEKGVLEDGTGITKLVRSYRIT

SEQ ID NO: 157773 - DNA, 1623 bp, Magnaporthe grisea 70-15
  CDS (1)..(1623)
atgtcggctccgttctcaaaggagcgggacgaaggcgtcctcaaagaggaaggcgttgtcaaagaggacagtcatgatcgtgtcaacgtcaccgacagcgatacggaaatcgcgggggtctccaaattccacgttgacgagaaacgcaagcttggagttacgggagcagtgtttctgattcttaacaagatgattggcaccggaatcttctcaaccccgtccagcatctttgcagccaccggctctgtcggtatctcattgatgctctgggtcattggcggaatcctcacttttgccggcatctcggtctttttagaatttggtctcgccatcccccgatctggcggcgaaaagaactacctcgagcgggcataccgccacccccggtacctggctacgtgcgtgctcgcggctcagatgatcctgctgggcttctcgtcaggaaactcgctcgcctttggccgctacgtcctgttcgccgccggcggtctcggcgagatcacgccggacaactggcaggcccgcggcatcgccgtcgcctgcgtcacctttgccatcctgctgcacgtcgtgctgcccaagtggggcatccgcctgttcaacgtcctgggcgtgttcaaggtcatcatcttgctgctcatagtcttttcgggcttcgccgcgctggccggccacaggctcgtcgacgacccgcgcaactttgacaacgcctttgccatcgagacgggagacggctacagcggcggcggggcatacgcgtactcgaatgcgctgctgaacatcatctacagcttcaagggctgggagaacgccaactacgtggtcggcgagctcaagaacccgcgaaagacgctcgccgtcgccatgcccctggccgtcggcggtaccaccatcctctacgtgctcgccaacgtggcctactttgcggccatcccaaagtcggaactggccaagtccgaggtgatcgtggcgggcatcttcttccgcaacgtgtttggagtccgtgccggcggcaccgctctgccggcctttgtcgccctgtccaacctcggcaacgtcctggccgtcagctttgcgcacgcccgcctgaaccaggagtttggcaaggagggtctgttgccgttcagccgcttctgggcctcgaccaagccctttggcacgccggcggccgctctcttcctgcactggatcgtcacggtgattgtgctgctggcgccgcccgccggctcggcctacaacttcatcgtcaacctctacacgtacccgggcgcctggatcaacgcctttgtcgcggccggcctcatctacctccagttcagcaagaaggagaactggtccagcccctggcacacgtacctgcccatcagcgtcctctacctcttggccaatgcgttcctcgccctcgtgcccttcatcccgcccgagaccagctggaacgaggacggatacccgtactacgtctttcccattgtcggcgtcggcgtgctgctcctcggtgcggcctactgggccgtgtggaccaagttgtggcccaagctgggaggctaccggattgaggccgagaggattactgatgaggatggcgaggaggttattcgctaccgcaaagtgcacgtgaggtga

SEQ ID NO: 157774 - protein, 540 aa, Magnaporthe grisea 70-15
MSAPFSKERDEGVLKEEGVVKEDSHDRVNVTDSDTEIAGVSKFHVDEKRKLGVTGAVFLILNKMIGTGIFSTPSSIFAATGSVGISLMLWVIGGILTFAGISVFLEFGLAIPRSGGEKNYLERAYRHPRYLATCVLAAQMILLGFSSGNSLAFGRYVLFAAGGLGEITPDNWQARGIAVACVTFAILLHVVLPKWGIRLFNVLGVFKVIILLLIVFSGFAALAGHRLVDDPRNFDNAFAIETGDGYSGGGAYAYSNALLNIIYSFKGWENANYVVGELKNPRKTLAVAMPLAVGGTTILYVLANVAYFAAIPKSELAKSEVIVAGIFFRNVFGVRAGGTALPAFVALSNLGNVLAVSFAHARLNQEFGKEGLLPFSRFWASTKPFGTPAAALFLHWIVTVIVLLAPPAGSAYNFIVNLYTYPGAWINAFVAAGLIYLQFSKKENWSSPWHTYLPISVLYLLANAFLALVPFIPPETSWNEDGYPYYVFPIVGVGVLLLGAAYWAVWTKLWPKLGGYRIEAERITDEDGEEVIRYRKVHVR

SEQ ID NO: 157775 - DNA, 1587 bp, Gibberella zeae PH-1
  CDS (1)..(1587)
atggccgatacaaagaaaacccaggccgttgatggcttgcgcggtcagccctacgatgacttcaacagcgatgagagacctgtcgctgataacggcagtaccatcgatgcgcagaattttgcctttactgaggatcgaaagattggtgttactggcgctgtctttttgattctcaacaagatgatcggaacaggaactactggatccgtgggcatatgtcttatgctatggatcatcggcggcttcttgaccttttgcggtctgagcgtgtttctcgaattcggactcgcgattccgagatctggtggagaaaagaattaccttgaaagagtctatcgacatccgaaatacttggcaacctgtgtcttggccagtcaaatgattcttcttggcttctcttccggcaactccctcgcctttggacgctacatcctttatgcatccggtaaggaaacacctgatggatgggaagcccgcggtatagcagtcgcatgtgtcaccttctccgtcctacttcacagcacgcttccaaagtggggtatacgtctcttcaatgtcttgggtgtattcaaagttgtcatcctgttgtttatagtcttttcaggcttcgctgcattggcaggacatcgtcgtgttccaaatcctcacaactttgacaacgcgttccgaatagaagatggtgatggctacggtggcggtggagcgtacgcttactcgaatgcccttctcaacatcatctacagttacaaaggctgggagaacgcaaactacgttctaggagaactgaagaaccccagaaaaacacttgctgttgccgcgcccatcgccattggcggcgtgacgattctttacgttctcgcaaacgtggcatactttgcagcaattcccaaatctgatctcgccaagtctgaagtcatcgtcgctggattatttttcagaaacgtctttggtcaaggtgctgcggcgaggagtctgcctgcgttcgtggcgctgagcaatttgggtaatgttttggctgtttcgtttgcccatgcgagagtgaatcaggagctggctaaagagggcatgcttccattcagtcggttctgggcatcgaacaagccttttaactcgcctgctccatctttgttccttcattggcttgtcactgtcattgtactcctcgcgccacctgctggaccagcctacaactttattgtcaacttattcaggtacacttaccccggctcatggatcaacggcttcgtcactgccggtctcatctatctccactggagcaagtctgaaaactggacatcgccatggcacacgtatcttccgatatcggtcatttatctgctcgccaacatctttctcgcacttgtaccattcattccaccagatggtgactggaacgcggatggatatccctactatgtctttcctgttgtcggtgttggcgttttgatactcggtggtgtctattgggcattctggaccaagattctgccaaggattggaggatacaagattgttgctgataggacgtttgatgatgctggggttgagacggtccggtaccgcaaggtttctgttcgacatcactag

SEQ ID NO: 157776 - protein, 528 aa, Gibberella zeae PH-1
MADTKKTQAVDGLRGQPYDDFNSDERPVADNGSTIDAQNFAFTEDRKIGVTGAVFLILNKMIGTGTTGSVGICLMLWIIGGFLTFCGLSVFLEFGLAIPRSGGEKNYLERVYRHPKYLATCVLASQMILLGFSSGNSLAFGRYILYASGKETPDGWEARGIAVACVTFSVLLHSTLPKWGIRLFNVLGVFKVVILLFIVFSGFAALAGHRRVPNPHNFDNAFRIEDGDGYGGGGAYAYSNALLNIIYSYKGWENANYVLGELKNPRKTLAVAAPIAIGGVTILYVLANVAYFAAIPKSDLAKSEVIVAGLFFRNVFGQGAAARSLPAFVALSNLGNVLAVSFAHARVNQELAKEGMLPFSRFWASNKPFNSPAPSLFLHWLVTVIVLLAPPAGPAYNFIVNLFRYTYPGSWINGFVTAGLIYLHWSKSENWTSPWHTYLPISVIYLLANIFLALVPFIPPDGDWNADGYPYYVFPVVGVGVLILGGVYWAFWTKILPRIGGYKIVADRTFDDAGVETVRYRKVSVRHH

SEQ ID NO: 157777 - DNA, 1578 bp, Gibberella zeae PH-1
  CDS (1)..(1578)
atgagtaacgacgatctcaagggtcttgaacccgaagccaacaagaccaactatgttggctctggcactggctctgacacagaagagggtcgtcttcagcatgctgccgacgccaagcgccagattggtgttctgagcgcatctatgctcatcttcaaccgagtcatcggtaccggtatctttgcgactcctggctccatccttgcccttcttggaagtcccggtctggccctcatcatttgggtcgttggttccctcatcgccgctgctggtactgccgtctacctcgaatggggaaccggtatccccaagaacggtggtgagaagaactacctcgagttcatctaccgcaagcccaagttcctcgtcaccggcatctacgcttcctacattctgctcatgggttgggcatccggtaactctgtcgtctttggcgagtacatcctccacgccgccaacaaggaggtcgaccgatggaaccagcgtgctattggtctggcttgcatcacgactgctttcctcatccacggctgcgctctcaagtggggtcttcgcctccagaacgcccttggcttcatcaagctggccatcgtcttcatcatgatcatctgcggtttcgtcgctctcggcggtcacctcaagatcgatgagaagcccgacaacctgagccgcgctttcgagggtaccactggcagcgcctacggtgttgtcactgctctgtacaacgtaatttggagtttcgtcggttacagcaacgccaactatgctctcagcgagactcgcaaccctgtgcgcactctcaagatcgccgctcctaccgccatcatttcggtctccgttatttacatcctcgtcaacatcgcttacttcgccgctgttcccaaggccgagatcattgcctctgagcgtcttgtcgctgcttctctcttccgcaacgtcatgggtcctgctgccgagcgcgccatgtctgtctttgtcgccctttctgctttcggcaacgtcttgagtgttatcttctctcagggtcgccttgttcaggagcttggtcgcgagggtattctgcctttctcccgtctctgggctagcaaccgacctttcaacgctcctttggccggtctcttcgagcactgggtcatttgcgttatcgtcatccttgctcctccccctggcgatgcttacaacttcatcctcaacctcatctcctaccctctcgccattgtcaacacttttgtcgctggtggtctcgtccacctatacctccaccgcgagaagtacaactggaacgcccctatcaaggctactctgcctgttaccgtcttcttccttctcagcaacatgtaccttgtgattgctcctttcatcgctcccgatgaccccagccagaaccagtacaagagcatgccttactacatccactgtgttgtcggtattggtatccttgtcgctggtgctttctactggcttgtctgggccgtcattcttcccaagattggtggctacaagcttgttcgcgagactcatgttgatgagatcgatggatgggagtccaaccgcttccgtcgcgttcctcttaattag

SEQ ID NO: 157778 - protein, 525 aa, Gibberella zeae PH-1
MSNDDLKGLEPEANKTNYVGSGTGSDTEEGRLQHAADAKRQIGVLSASMLIFNRVIGTGIFATPGSILALLGSPGLALIIWVVGSLIAAAGTAVYLEWGTGIPKNGGEKNYLEFIYRKPKFLVTGIYASYILLMGWASGNSVVFGEYILHAANKEVDRWNQRAIGLACITTAFLIHGCALKWGLRLQNALGFIKLAIVFIMIICGFVALGGHLKIDEKPDNLSRAFEGTTGSAYGVVTALYNVIWSFVGYSNANYALSETRNPVRTLKIAAPTAIISVSVIYILVNIAYFAAVPKAEIIASERLVAASLFRNVMGPAAERAMSVFVALSAFGNVLSVIFSQGRLVQELGREGILPFSRLWASNRPFNAPLAGLFEHWVICVIVILAPPPGDAYNFILNLISYPLAIVNTFVAGGLVHLYLHREKYNWNAPIKATLPVTVFFLLSNMYLVIAPFIAPDDPSQNQYKSMPYYIHCVVGIGILVAGAFYWLVWAVILPKIGGYKLVRETHVDEIDGWESNRFRRVPLN

SEQ ID NO: 157779 - DNA, 1779 bp, Candida glabrata CBS 138
  CDS (1)..(1779)
atgtgtagatgtatagaagagaaagataacatagtaaatagtaaaacagaacagaaaacagtgcatacaatgtctgatttcttgtcacagttgaatatcttcaacaaagagaattacaaattctcgtcctcggagaagtctgaggatgatacgtctgatttcgagactggacagcagttcgccacggagctggaccaaggtgagaaaagactgggtcttatctcatgtattgggttgatctgtaacagaatgctgggaaccggtgtcttcgcggtttcttctacgatttacactctgagcggctccatcggtctggcgctgatcctgtgggctgtgggtgcgctcatcgccctggcaggtctatacgtatacatggaattcggtaccgctataccgagaaatggtggtgagaagaactacttggaagccatcttcaagaaaccaaagtttttcatcacatgcatgtatgcgtcctatgtttttttcctaggttgggccgcggggaactcagttaacaccgcggtgatgttcttgaccgccgctaacaccgaagtgactaagtggaaccaaagaggtattggtgtagctgtggtgttcttctgtttcgctgtcaactccatcaacgttagagccggtctgtacatccaaaatgtgctcggtgtcttcaagttgggtatcgttatcttcatctcaatcaccggctgggtggcccttgcaggtggtttgaagcacggataccagtcgcataacttccacaacgcgttcgaaggtaccaacaaggctaccgcttacggtgtggtcaacgccttgtacaatgtcatctggtccttcgtcggctactccaacgtaaattacgccctaggtgaagtcaaaaacccagtgagaactctaaagatcgcaggccctacttctttgatctgtttggccatcatctatatctttgtcaacatcgcatactttgctgtggttccaaaggataaactgatctcttccaagttgatcttggccgctgatttcttcgatatctgttttggtggtcatgctaagagagttgccgctgcccttgttggtctaagtgccctgggtaatgtcatgtcagtcatcttctcccaaggtagaattatccaacaacttggccgtgaaggtgtcttgccattctccaatttctttgctacatccaagcctttcaactccccaatggttggccttttccaacatttcatcatttgtatgatcactatcttggctcctcctccaggtgacgcttataacatcatcctgaacttgatctcttacccaatgaacattgtcaatttcgtgatctccgcgggtttgctatggatctactggcagagaagacaaggcaagattgaatggaacccacctattaaggccggcgtcttcattactactttcttcatgttgtctaatgtttacctgatcgtcgctccatatatcccaccaacccacggtgaaagcgtctacgagcacgctccatactggattcactgtgtggtcgcttggggtatcttcgcgtttggtggtttctactggttggtatgggccaaattactaccaagatggggccattacagattggaatccaaggaagtacttggtgatgatgggttctggagaatgcaaatcattaaagtcccagaaagtgaagtaggcgacgattcaattgattcttcagatggagagaatatccactctaatgatatcgaagtgctagattaccaagaaagtaaggaatcgcacaaaatatctcacgaataa

SEQ ID NO: 157780 - protein, 592 aa, Candida glabrata CBS 138
MCRCIEEKDNIVNSKTEQKTVHTMSDFLSQLNIFNKENYKFSSSEKSEDDTSDFETGQQFATELDQGEKRLGLISCIGLICNRMLGTGVFAVSSTIYTLSGSIGLALILWAVGALIALAGLYVYMEFGTAIPRNGGEKNYLEAIFKKPKFFITCMYASYVFFLGWAAGNSVNTAVMFLTAANTEVTKWNQRGIGVAVVFFCFAVNSINVRAGLYIQNVLGVFKLGIVIFISITGWVALAGGLKHGYQSHNFHNAFEGTNKATAYGVVNALYNVIWSFVGYSNVNYALGEVKNPVRTLKIAGPTSLICLAIIYIFVNIAYFAVVPKDKLISSKLILAADFFDICFGGHAKRVAAALVGLSALGNVMSVIFSQGRIIQQLGREGVLPFSNFFATSKPFNSPMVGLFQHFIICMITILAPPPGDAYNIILNLISYPMNIVNFVISAGLLWIYWQRRQGKIEWNPPIKAGVFITTFFMLSNVYLIVAPYIPPTHGESVYEHAPYWIHCVVAWGIFAFGGFYWLVWAKLLPRWGHYRLESKEVLGDDGFWRMQIIKVPESEVGDDSIDSSDGENIHSNDIEVLDYQESKESHKISHE

SEQ ID NO: 157781 - DNA, 1749 bp, Candida glabrata CBS 138
  CDS (1)..(1749)
atgacggataataaaagaagttttttatcgcagttgaatgtattcaacaaggataattaccaaatatcttcaaagaaatctgaagaaggagtatatagtaatgagacagaagaagcatctgatgttgagacgggacaacagtttactacagagttggatcaaggtgagaaaagactgggtcttttctcctgtattggtttgatctgtaatagaatgctgggtaccggtgtttttgcggtttcttctaccatttatacactgagtggatctatcggtttggccttgattctatgggccgtcggcgccattatcgcgatatcgggtctatatgtctatatggagttcggtaccgctataccgaaaaatggtggtgaaaagaattacttggaagccatcgttaagaaaccaaagtttttcattacatgcatgtacgcatcatatgtctttttcctaggttgggccgctggtaactctgtcaacactgcagttatgttcttgactgctgctgacgcggaaatcactaagtggaaccaaagaggtattggtgtagctgtcgtcttcttctgtttcgctgtgaatgctattagtgtcaaggctggtctatatttgcagaatctgctaggtattttcaaagttggtatcgttttgttcatctctgttaccggctgggtcgccctgggaggtggtttgaagcatggttaccaatctcataacttccacaatgcttttgaaggtaccaacaaagctacagcatacggtgttgtcaatgccttgtataatgtcatttggtcatttgttggttactccaatgttaactatgcgcttggtgaagttaaggacccagtcagaactctaaagattgcaggaccaacttctatggtttgtttggccattatttatatatttgtcaacattgcatattttgctgttgttccaaaggagaagctgatttcctccaaattgattttggcagctgatttcttcgacatctgtttcggtggtcactcaaagagagttgctgctgctcttgttggtcttagtgccttgggtaatgttatgtctgttatcttctcccaaggtagaattatccaacaacttggtcgtgaaggtgttttgccattctccaactttttcgcaagttctaagccattcaactccccaatggttggtcttttccaacatttcataatctgtatgattactattattgcaccacctccaggtgacgcttataacattattttgaacttgatttcctacccaatgaacattgttaactttgtggtctccgctggtttgttatggatatactggcagagaagacaaggtaagattgagtggaacccacctatcaaggctggtgtatttgtcacaactttctttatgttgtctaatatttacttaattgttgcaccatatgttccaccaactcatggtgaaagtgtctacgagcatgctccatactggattcactgtgttgttgcttggggtatctttgcatttggtggtttctattggtttgtttgggttaaagtattacctaaatggggtaactacagattggagactaaggacatccttggtgaagatggcttctggagagttcaagttattaaagtaccgaacgaaactgataaagatcaccaagaacaatctgatgagtcaggcactgaaagagctgacacgtttgaactggactatattcatttagagccaagcaaagatactgccaagtctcacttggactaa

SEQ ID NO: 157782 - protein, 582 aa, Candida glabrata CBS 138
MTDNKRSFLSQLNVFNKDNYQISSKKSEEGVYSNETEEASDVETGQQFTTELDQGEKRLGLFSCIGLICNRMLGTGVFAVSSTIYTLSGSIGLALILWAVGAIIAISGLYVYMEFGTAIPKNGGEKNYLEAIVKKPKFFITCMYASYVFFLGWAAGNSVNTAVMFLTAADAEITKWNQRGIGVAVVFFCFAVNAISVKAGLYLQNLLGIFKVGIVLFISVTGWVALGGGLKHGYQSHNFHNAFEGTNKATAYGVVNALYNVIWSFVGYSNVNYALGEVKDPVRTLKIAGPTSMVCLAIIYIFVNIAYFAVVPKEKLISSKLILAADFFDICFGGHSKRVAAALVGLSALGNVMSVIFSQGRIIQQLGREGVLPFSNFFASSKPFNSPMVGLFQHFIICMITIIAPPPGDAYNIILNLISYPMNIVNFVVSAGLLWIYWQRRQGKIEWNPPIKAGVFVTTFFMLSNIYLIVAPYVPPTHGESVYEHAPYWIHCVVAWGIFAFGGFYWFVWVKVLPKWGNYRLETKDILGEDGFWRVQVIKVPNETDKDHQEQSDESGTERADTFELDYIHLEPSKDTAKSHLD

SEQ ID NO: 157783 - DNA, 1737 bp, Kluyveromyces lactis NRRL Y-1140
  CDS (1)..(1737)
atgtcgggtagtcgatcatttctctcgcagttgaacgtgttcaataaggataactacgagatatctactgattctaaaacgcttgatacagacgccaatcctactggtactagcgatgacaatagatctgttgaaacaggtgaacatttcgatgtcgaattggataagggatctaagaaacttgggctcatctcatgtattggtctaatctgtaatcggatgttaggtaccggtatctttgccgtatcttccaccatttatactttgagtggttccgttggtttagcgttgatcatgtgggcagtgggtgccattattgcattagctggtctttatgtgtatatggaattcggaactgccatcccaagaaacggtggtgaaaagaactatttagaacgtattttccctgcacctaagttctttgtcacttgcatgtacggtgcgtacgttttcttcctcggttgggctgccggtaactcagtgaatactgcagtcatgtttttaacagcagctaacgctgatatcacagaatggaaccaaagaggtatcggtgtggcagttgttggtttcgctttcctcatcaactctgtcaatgtcaaagtgggtctatacattcagaatattttgggtatcttcaagatcggtgtcgtgttgttcatcgccgttaccggttgggttgctcttggtggtgggttgaaagacggttataagacagacaatttccacaatgcattcgagggtaccggaaatgctaccgcttacggtattgtgaacgcgctatacaacgtcatttggtcatttgttggttactctaacgtcaactatgctcttggtgaagtgaaaaatccggttagaacgttgaagattgctggtccaacctcattgatattcttggccatcgtatacatctttgtgaacattgcttattttgcagtggtccctaaagaagtgttcagaacctctaaattgattttagttgctgatttcttcgaacttgctttcaaaagtgatagtgcaaagaaggctgcttctgttcttgttgggttaagtgccttgggtaacgtcatgtcggtaattttctcccaaggtagaatcatccaacaattgggccgtgaaggtgtcttacccttctctaacttctttgccacttcaaaaccatttgattctccatgtgttggtcttttccagcattttatcgtctgtaccgttaccatcattgctcctccagctggtgacgcttataatttcgttttgaacttgatttcgtacccaatgaacatcgtcaatttcttcatcagtgcaggtttactatggatccactgggagcgcaaaaagggaagaaccatgtgggatccaccaatcaaggctggtattccagtcattgcctttttcatgttggctaatctgtatcttatcgtcgctccatacatcccaccatctaacggtgaatctgtttaccaatcgctaccatactggattcactgtgtggtcgcttggggtatctttgccgttggcggtatatactgggtcgtatgggccgttgttttaccaaagatcggtaaatatgaattggtacacgaagaagttcttggtgaggacggtttctggagacaaaagatcgcaaagagaaagattaatgaagctaatgccgaacagatatcttttgaactagaaaaggtcagcaactcaactggtttcgagaaaattccagatcaacatactgtaaccattgcttag

SEQ ID NO: 157784 - protein, 578 aa, Kluyveromyces lactis NRRL Y-1140
MSGSRSFLSQLNVFNKDNYEISTDSKTLDTDANPTGTSDDNRSVETGEHFDVELDKGSKKLGLISCIGLICNRMLGTGIFAVSSTIYTLSGSVGLALIMWAVGAIIALAGLYVYMEFGTAIPRNGGEKNYLERIFPAPKFFVTCMYGAYVFFLGWAAGNSVNTAVMFLTAANADITEWNQRGIGVAVVGFAFLINSVNVKVGLYIQNILGIFKIGVVLFIAVTGWVALGGGLKDGYKTDNFHNAFEGTGNATAYGIVNALYNVIWSFVGYSNVNYALGEVKNPVRTLKIAGPTSLIFLAIVYIFVNIAYFAVVPKEVFRTSKLILVADFFELAFKSDSAKKAASVLVGLSALGNVMSVIFSQGRIIQQLGREGVLPFSNFFATSKPFDSPCVGLFQHFIVCTVTIIAPPAGDAYNFVLNLISYPMNIVNFFISAGLLWIHWERKKGRTMWDPPIKAGIPVIAFFMLANLYLIVAPYIPPSNGESVYQSLPYWIHCVVAWGIFAVGGIYWVVWAVVLPKIGKYELVHEEVLGEDGFWRQKIAKRKINEANAEQISFELEKVSNSTGFEKIPDQHTVTIA

SEQ ID NO: 157785 - DNA, 1644 bp, Debaryomyces hansenii CBS767
  CDS (1)..(1644): transl_table=12
atggggcttacagatttctataagaagctgtcttcggctgaagaaacgaacgataacagtgagactgtttcgtacaactcgagtaatgacaaagaagcagcagttgtgcaattagatcaaaacaagaaggaaataggatatttgtcagctacttcgttatgtcttaacagaatgttgggtgccggtgttttctctacaggatctacaattttctcgttgtcagggtcggttggtacttcattaattatgtgggctgctggttctataattgcgttcactggtttatacgtgtatatggagttcgggtcagcaattcctagaaacgggggagaaaagaactaccttgagtatatgtacaagaaaccaagattcttaataacggcgatgtatgcgtcgtatgctttcttcttaggttgggcatctggtaattctattgtggttggtgaataccttttgaatgcagcggaagttgaggtgacacagtggaattccagagcaatcggtattggggtgatcacatttgcgtttattgtcaacggtattaatgttaaatttgggttattcttgggtaacatattaggtttattcaagattgttattgttttgttaatcactgtgactggttgggttgctcttggcggaggtatccataccaatggcttccaggcccctgataacttttccaatgcctttgagggtgaatctccatccggatttgggatcgtgaatgcgttatataacgttatctggtcatatgttggatactcgaatatcaactatgctttaggtgaagtgaagaatcctgttaaagtgttacgtattgccgctcctactgcatttatttcattggcaattatttatatgtttgtcaatattgcatactttgcagttgtgccaaaggaagaaatcgctaattcgggtagaattttggcggcttccttcttcagatacgcttttggtaagactgctgaaacggcatcatcagtatttgttgcattatcagccttaggtaatgtgatgtcagtcattttctcacaaggtagaattattcaacaattgggtagagaaggtagtttgccattttccagattttttgcgactcaaaaaccattcaatactccatttgttggtttaatgcaacattggatagtttgtattgtgacgattgttgcacctcctccaggagatgcctataatttcatcttgaatttaatctcgtacccattaaatgttgttaacactgcagtcgcattcggcccatcatatattcactggcagaagcgtagagggttagtggaatgggatcctccaattaaagcatcaattccaatcattgttttttttgcattttcttcattatacttgattgttgcaccatatattcctcctactgatggacaaacagtttatcaggatttaccatactggatacacccagttgtcacctggggtgttttcggtgttggggctgtatactggttgttgtgggccaaggttttgccgcattttggtggctacagattggttgcgaaggaagtacttggtgaagacggattctggaggaataagttctataaaatttcaagagacgaaacaaacgctgttgacgaggacggcgatgagatcgcagaaagaatcatataa

SEQ ID NO: 157786 - protein, 547 aa, Debaryomyces hansenii CBS767
MGLTDFYKKLSSAEETNDNSETVSYNSSNDKEAAVVQLDQNKKEIGYLSATSLCLNRMLGAGVFSTGSTIFSLSGSVGTSLIMWAAGSIIAFTGLYVYMEFGSAIPRNGGEKNYLEYMYKKPRFLITAMYASYAFFLGWASGNSIVVGEYLLNAAEVEVTQWNSRAIGIGVITFAFIVNGINVKFGLFLGNILGLFKIVIVLLITVTGWVALGGGIHTNGFQAPDNFSNAFEGESPSGFGIVNALYNVIWSYVGYSNINYALGEVKNPVKVLRIAAPTAFISLAIIYMFVNIAYFAVVPKEEIANSGRILAASFFRYAFGKTAETASSVFVALSALGNVMSVIFSQGRIIQQLGREGSLPFSRFFATQKPFNTPFVGLMQHWIVCIVTIVAPPPGDAYNFILNLISYPLNVVNTAVAFGPSYIHWQKRRGLVEWDPPIKASIPIIVFFAFSSLYLIVAPYIPPTDGQTVYQDLPYWIHPVVTWGVFGVGAVYWLLWAKVLPHFGGYRLVAKEVLGEDGFWRNKFYKISRDETNAVDEDGDEIAERII

SEQ ID NO: 157787 - DNA, 1677 bp, Yarrowia lipolytica CLIB122
  CDS (1)..(1677)
atgtttccatttgacgtggaaaaaaacaagggaacgtcttccgagagtatccactcaatccacgtttctgaaatccactccgatgtccgatccgagtcgatcatcggagcaccggaagaggaagaatctcctcttggtcagcatgtgggaaagttcacggtggtggctctcaatttctctcagatgatcggaacgggtatttttgtcacccctggctccattttgaaaggcgtgggctccattggagcgtcgttgatgctctggctggccggaatcatcatttcgttctccggatttgccgtttacaccgaattcgcaagcatgtaccccaaacgagctggtgccgacgtggcctatctggaaaaggcgtttcccaagcccaaatatctcatgcccgttgtttttgccgtcatttcagttctgctgtcctactccgcctcaaatgccattgtcttctccgagtacgttctggtggcagcaaaccaagaggtgacggagtggacccagcgaggaattgcaattgcagccattgccggcgtctgtctcatgtcctgggtcagcaacaagtggagcatgcgtctacagaacgtcattgcatatgtcaaggtcatcattctcttctttgtggccatcaccggcctggtggtcctgggaggtcacacccgtgtcaaaaaccccagagataacttcaaggaccctttcaagggaaccactggaaatgccaacgtctgggctaacgctctcgtcaagatcatcttctcttttgccggttggaacaacgctaataacgtcctaaatgagatccccgacgccgtgagaacggtcaaaatctatggatctgtggcccttgccctcgtgtcagtcctgtacatgctgtgtgctgtcgcatattttgcagcggtcactaaggaagagatcaaacacagtaacctgctgactgccgctctgttcttcaaaaatgtgtttggcgagagcgctggacagcgtgtgctgcctgctcttgtggctgtgtcttctattggaaacctcctggctgtgactatcggacattctcgtattgtgcgggaggttggacgtcaaggtgttctcccctggcccaacttctggaccaacacatggcccttcggcactcccggtggagctctgttggtgaaattcattctcacagtcattgtcattgtggctcctcctcccggcgatgccttcaactttgtggtcgatctccagtcctatcccagcaacattttcctgtgtctgctagtggtaggactgttcattgttcgacgaagacgacaaaaggccggtcttggaagagctcccttcagagcatacacggtcgtcgccgtcttctatttcctggtgtcgctattccttttggcggctccttgggtgcctccccccggaggagccaacggaggagacgtttccttctggtacgccacctactgtgtggttggaatcggtatcatccttctttgcggtatctactactacatctgggctgtggtttggcccaagtttggaggcttcaaacatgtcgaacagatcatcactctgcctgacggctccacctacaccaagatcaaccgggtgaagaacgatgtccagcattcggacgaaagtgagggggagagtgagaccaagagcgctcgagtcgaggaaaaggagattgtttag

SEQ ID NO: 157788 - protein, 558 aa, Yarrowia lipolytica CLIB122
MFPFDVEKNKGTSSESIHSIHVSEIHSDVRSESIIGAPEEEESPLGQHVGKFTVVALNFSQMIGTGIFVTPGSILKGVGSIGASLMLWLAGIIISFSGFAVYTEFASMYPKRAGADVAYLEKAFPKPKYLMPVVFAVISVLLSYSASNAIVFSEYVLVAANQEVTEWTQRGIAIAAIAGVCLMSWVSNKWSMRLQNVIAYVKVIILFFVAITGLVVLGGHTRVKNPRDNFKDPFKGTTGNANVWANALVKIIFSFAGWNNANNVLNEIPDAVRTVKIYGSVALALVSVLYMLCAVAYFAAVTKEEIKHSNLLTAALFFKNVFGESAGQRVLPALVAVSSIGNLLAVTIGHSRIVREVGRQGVLPWPNFWTNTWPFGTPGGALLVKFILTVIVIVAPPPGDAFNFVVDLQSYPSNIFLCLLVVGLFIVRRRRQKAGLGRAPFRAYTVVAVFYFLVSLFLLAAPWVPPPGGANGGDVSFWYATYCVVGIGIILLCGIYYYIWAVVWPKFGGFKHVEQIITLPDGSTYTKINRVKNDVQHSDESEGESETKSARVEEKEIV

SEQ ID NO: 157789 - DNA, 1725 bp, Yarrowia lipolytica CLIB122
  CDS (1)..(1725)
atgggtctcaacttcattaacaaattgaccaagtcagcgtcaccttcgtacgacgaaaaggagcgagaaaacgtctccgttaactctgccgatggtctcggtaccgagcctcgaattatggaggctggagacccccatggatccgactcctcaattctcaatctgggtaacggagaaatcattgacaagacctctgatgaccgaaagcagattggtgtcatgtctgctgtcttcctaattttcaaccgaatggttggaaccggtatcttcgccaccccctctactatctacctgctttctggatccgttggactcgccctcatcatgtgggttgttggagctctgattgctggagccggtctcatggtctacctcgagtggggtacaaccatccccaagaacggaggagagaagaactacctcgagtacgtctaccgaaaacccaagtttctaatcacagccatgttcgcttcctacgtgtttctgctcggatgggctgctcccaactccgttatcttcggagagtacattctgaacgccgctgaggttgaggtcacccgatggaaccagcgaggtatcggtcttggatgtctgtctttctgcttcctcatccactctatctccgtaaagtggggtctgcgactccagaacttcctcggtgtcttcaagctcattgtcattgctctgatcacaattgtcggctggattgccctgggaggaggtctcaagcacgtcaaggaccctcatgcaaacttccgaaatgcattctcaggctctgagaaggccactggatacggtattgtcatggctctctacaacgtcatctggtccttcattggatactccaacgccaactatgctctctccgaggccaagaacccggttcgaaccctcaagattgctggtcccctcgccctcatcatggttgccattttctacatgttctgtaacatctcctattttgccgtcgtcccccgggagcagattggtgagtccggacgaattttggctgccaccttcttccgagtggcttttaacgagtctgccgagaaggccatgtctgtctttgttgcactttctgccctgggtaacgttctttccgtcattttctcgcagggccgaattatccaggagcttggtcgagagggtgtactgcctttctcttctttctttgcttccaataagcccttcaactctcctttccccggtctgttcgagcactactgtgtctccattgtcattctgctggcccctcctcctggagacgcttacaacttcatttccaacttgatcacataccccctttcggccattaacgtggttgtgtccctgggtctgctttgggtccactttgacagatggcgacacgcccgaaaccccaacctgcctccttctatcttcgcagacttcaaccctcccatcaaggccactatccccgtcaccatcttcttcatgctggcgtctctttaccttgtggttgcccccttcctgtctcctgatgccgaccagtccgtctacaaggatctgccctactggctgcattgtgtggtgggaatcgctcttttcgctgctggtgccgtctactggctcttctgggccatcatcttccccaagctgtttaactacaagctggtgaagcagacagtcattggatccgacggttggtcaagaacggttatcacccgagtcaagaacggcgagattggtgagggcgaagagttctaa

SEQ ID NO: 157790 - protein, 574 aa, Yarrowia lipolytica CLIB122
MGLNFINKLTKSASPSYDEKERENVSVNSADGLGTEPRIMEAGDPHGSDSSILNLGNGEIIDKTSDDRKQIGVMSAVFLIFNRMVGTGIFATPSTIYLLSGSVGLALIMWVVGALIAGAGLMVYLEWGTTIPKNGGEKNYLEYVYRKPKFLITAMFASYVFLLGWAAPNSVIFGEYILNAAEVEVTRWNQRGIGLGCLSFCFLIHSISVKWGLRLQNFLGVFKLIVIALITIVGWIALGGGLKHVKDPHANFRNAFSGSEKATGYGIVMALYNVIWSFIGYSNANYALSEAKNPVRTLKIAGPLALIMVAIFYMFCNISYFAVVPREQIGESGRILAATFFRVAFNESAEKAMSVFVALSALGNVLSVIFSQGRIIQELGREGVLPFSSFFASNKPFNSPFPGLFEHYCVSIVILLAPPPGDAYNFISNLITYPLSAINVVVSLGLLWVHFDRWRHARNPNLPPSIFADFNPPIKATIPVTIFFMLASLYLVVAPFLSPDADQSVYKDLPYWLHCVVGIALFAAGAVYWLFWAIIFPKLFNYKLVKQTVIGSDGWSRTVITRVKNGEIGEGEEF

SEQ ID NO: 157791 - DNA, 1575 bp, Aspergillus nidulans FGSC A4
  CDS (1)..(1575)
atggacatcacttcggggcctgtcctcaagaatgaggttgcaccagacaccaagctcgttgaagatggcccgcgccgcgcagatggcgttacccagctatacgaaggaaacattttcgaggcgacgcccgaagaccgtcgccagatcggtgtcgtcagtgcatcgttcctgatcttcaatcgcgtcattggaaccggtatcttcgctaccccgagtacgatcctgtcgttgtccgggagtgtcgggctatcgctattcatgtgggttgctggcactttgattgccgtcgccggtactgcggtctacctggaatggggtactgccattcctaagaacggaggtgagaagaactatctcgaatacgtctacaagaaacccaagttcttggccacggccatgtttgctgcctacgccgttttactcggatgggccgcaagtaacagcgtcgtcttcggccagtatatcctcaacgccgccgaggtagaagtcgaccgatggaaccagcgaggtattggccttgcttgcatcactgctgcgttcctgattcacggcttcgcgctgaactggggtctccgtcttcagaacctgcttggtattgtcaagctcatcattatcatcttcgttattgtcactggctgggtggctttggctggccacacgaagattgagacgcctcacaacttccaaaatgcctttgagggaactactggaagcggatatggtgttgtcatggcattgtataatgtcatttggtcgtttatcggctactcgaatgccaattacgccctgagcgaaaccaagaaccccgagcgtacattgaagattgccgcccccgtcgcaattgggtctgtcggtgtcctttatatgctctgcaacatcgcctacttcgccgcagtcccgaaagaccaattcctcgcatcaggcaacatcgtcgcagcgacgttcttcgggaacatgttcggctcccgcgcagagcgcgtcatgtctgtctttgtggctttgtcggcatttggaaacgttctctctgtgatcttttcgcaaggccgaatcgtacaggaactcggccgcgaaggcgtcctccccttctctaaattctgggccagcaacaagccctttaagtcccctgccgctggactctttgaacactgggtcgtctctgtgattatcatgcttgctccgcctccaggagatgcctacaacttcctcgtcaacctgatctcctacccgctcgccattgtaaacgtcttcgtctccgccggtctaatctacatttacctcacgaaagaaaagaacttcccgaactgggctcccggcatccgcgcaaccctccctgtaacagttttcttttgcctgtcaaacatctacctcgtggtggcgccatatatcccgccttccgccggccaaagcgtctacgaagagctcccttattacctgcactgcgttgttgcattgggaatctttgcgcttggcgctatctattatcttgtttgggcagttgccatgccgcgcctcggcggccaaacagccaacaaacttgcatctacgaagccctcgcgaagagcatactatgaatag

SEQ ID NO: 157792 - protein, 524 aa, Aspergillus nidulans FGSC A4
MDITSGPVLKNEVAPDTKLVEDGPRRADGVTQLYEGNIFEATPEDRRQIGVVSASFLIFNRVIGTGIFATPSTILSLSGSVGLSLFMWVAGTLIAVAGTAVYLEWGTAIPKNGGEKNYLEYVYKKPKFLATAMFAAYAVLLGWAASNSVVFGQYILNAAEVEVDRWNQRGIGLACITAAFLIHGFALNWGLRLQNLLGIVKLIIIIFVIVTGWVALAGHTKIETPHNFQNAFEGTTGSGYGVVMALYNVIWSFIGYSNANYALSETKNPERTLKIAAPVAIGSVGVLYMLCNIAYFAAVPKDQFLASGNIVAATFFGNMFGSRAERVMSVFVALSAFGNVLSVIFSQGRIVQELGREGVLPFSKFWASNKPFKSPAAGLFEHWVVSVIIMLAPPPGDAYNFLVNLISYPLAIVNVFVSAGLIYIYLTKEKNFPNWAPGIRATLPVTVFFCLSNIYLVVAPYIPPSAGQSVYEELPYYLHCVVALGIFALGAIYYLVWAVAMPRLGGQTANKLASTKPSRRAYYE

SEQ ID NO: 157793 - DNA, 1662 bp, Candida albicans SC5314
  CDS (1)..(1662): transl_table=12
atgggttttactgatttatataaacctctggaaagtcccgagaagaggtcagacaccaacaccgataatttgagtgaatattccactgatcatgaaatagaagctggtgttcaattggatcaaaatgtcaaacaaattggcataatttcagccacttttcttattatcaacagatgtattggtgctggtatttttgctactggttccacaatttatactttgtcaggtagtgttggaacatcattgattttatgggttgccggtactttaattgcctttgccggattattagtttatatggaatttgggtctgttttaactagaaatgggtccgaagtcgtttatcttcaacatatttacaaaagcccaagattcttggttatttcatcatatgcagtgtatgccctcactatgccttggactgctggtaatagtgtagtcactggagaatatattttaaccgccgctggaaaagaagtcacacaatggaattcaagaggtattgccttggctgttgtcacctttgccttcttaatcaatgctatcaatgccaaggcagggttgtttatggcaaacactttgggttcattcaaaattgtcattattttattcattattattactggatgggtcggtcttggtaacggtatcaagactggtcattttgaaccaactcataatttccacaacgcctttgaaggtcaaacaccaactggctatggtatctgtgttgccttgtataacgtcatttggagttttgttggatacagtaatgcgctgtatgctttgggtgaagttaaaaacccaatgaaggtgcttaaagtatcagcaccacttgcacttttaggtatagccattgcctatatgttggttaatattgcttactatgccgttgtcccagttgacgttattgctgctagtaaaagaattttggtagcagactttttctattatgcatttggttctaaagccagtaaagctgctgccgttttcgttgctttatctgcttggggtaatgttatgtcagttattttctcacaaggtagaatcatcacccaacttggtcgttctggtgtcattccattttctcgtttctttggaagtagtaaacctttcaacactccattcaccggtttacttgaacattggataattggagtcattttcatctgtgccgttccaccaggtgattcatataactttattcttaacttggtgtcttatcctttgaatgtgatcaacactttattaggtgctgggttggtatggatctatatcagaaaataccagggcaaatacgaatggaacccaaagattaaagcaactttcccagtggcagtgtttttcttcttatcttcattatatcttgttgctgctccatatattcctccatcagaaggccaatccgtttatgagaaactcccgtactggttgcatgctgttgtcacttggggtgttttcggactcggtggaatttactgggtcatttggactcaattattgccacgttttggcggttacaaattggttgaaaaagaagttcttggtgaagatggattctggagaaataagatatataaagtttcaaaagatagtaccgaggaggaaatacagcagcaagttgaagctgcagttgaagctgaaggaaataaacttaagtaa

SEQ ID NO: 157794 - protein, 553 aa, Candida albicans SC5314
MGFTDLYKPSESPEKRSDTNTDNLSEYSTDHEIEAGVQLDQNVKQIGIISATFLIINRCIGAGIFATGSTIYTLSGSVGTSLILWVAGTLIAFAGLLVYMEFGSVLTRNGSEVVYLQHIYKSPRFLVISSYAVYALTMPWTAGNSVVTGEYILTAAGKEVTQWNSRGIALAVVTFAFLINAINAKAGLFMANTLGSFKIVIILFIIITGWVGLGNGIKTGHFEPTHNFHNAFEGQTPTGYGICVALYNVIWSFVGYSNASYALGEVKNPMKVLKVSAPLALLGIAIAYMLVNIAYYAVVPVDVIAASKRILVADFFYYAFGSKASKAAAVFVALSAWGNVMSVIFSQGRIITQLGRSGVIPFSRFFGSSKPFNTPFTGLLEHWIIGVIFICAVPPGDSYNFILNLVSYPLNVINTLLGAGLVWIYIRKYQGKYEWNPKIKATFPVAVFFFLSSLYLVAAPYIPPSEGQSVYEKLPYWLHAVVTWGVFGLGGIYWVIWTQLLPRFGGYKLVEKEVLGEDGFWRNKIYKVSKDSTEEEIQQQVEAAVEAEGNKLK

SEQ ID NO: 157795 - DNA, 1674 bp, Aspergillus fumigatus Af293
  CDS (1)..(1674)
atggggttccagtccaagtccgagcaacatggtgagtctgatgcctcgagcttgagcagtggtgacctgcaatacactgctcaagccggggccaactcctctgtgccaacctaccaagaagccagcggggcgccggtcgaaatcaactcaccgttgggatactcggtgggttggattactgtcgtctttctcaatctcagtaagatgatcggaaccggtgtcttttctaccccatcaactgtcctcaaaggcgccgggtccgttggcctggcattgttctactgggtcattggattcctcatggccggcagctcactggccgtctacctggagttctcgtcctatttccccagtcggtccggctcagaggtcgtctatcttgaacaggcgtatccgcgaccaaagtacttccttccgactgtttttgcaatgcaatcggtgttgttctcgtttagcagtagtaatgcgattggtatgtgcaccggttcctgggagaatatatctgaccgattagtcctcgcgcagtatcttttccgacttgcggaggcgcagtccacaccgtggaagctcaagggcgttgctgtcgcttccattggtatcaccggcctagttgtccttgggggacacaccaagaccgaagatcccaaggccaattttcgcgacgcctttgcgggtagttcctctgcctcggtgtatggtgccacaaacgccctggtcaaggtggccttctcgtacgcgggattcgaaaatgcgttcaacgtggtgaacgaagtcaagaatcctgtcaaaacgttgcgatggagcgcgccgctctccctcctgctcgtagcaaccctatacatgctcgccaacatcgcctatttctccgccgcatcaaaggaagagatcctcggctcaaaggtcgtggcggcgagtatcttcttccagaaagtcttcggcacgagcagcgcgtcacgagccctgaacttcttgatctgtctcagcgcattcgggaacctgcttgccgttcttatcgggcagtcccgtctcctccgagaatgcggaagacaaggagtcctcccgttcaccaagttctggacctcgacccgtccattcggcacgccgcttgggccctacgcgctgaaatgggccttgaccgtcctcatgattctagctccaccagccggtgacgccttcaattttgtcgtcgacctgggcgtctaccccaccaatgcattcgccttattcctcgccattggactattgctcacccgtcgtcaccgtacacggcacaacattccaccttctgggtacaaggcgtggaacgtggtcgtcggcttttccatcctctcgaatctgtacatggtggttgcgccgtggtatccgcccgcgacgggggcgaagggaggggatgtgagtttctggtatgcgacgtactgcgtcgtggggttgggaattatcgggctctgtggggtgtattactacgtctatatcaaggtgttgccgcggcttggcgggtatgcgttccggcagattgtcctgcaaatggaggacggggcgacggcgcataaattggtcaaggttccgaaggagcagttgaaggcatgggatgccgaacatgatgctacggggagagagcgagcgaaggatgaggccgttagtacagctgttgatgtcaagcatgatggcgtctag

SEQ ID NO: 157796 - protein, 557 aa, Aspergillus fumigatus Af293
MGFQSKSEQHGESDASSLSSGDLQYTAQAGANSSVPTYQEASGAPVEINSPLGYSVGWITVVFLNLSKMIGTGVFSTPSTVLKGAGSVGLALFYWVIGFLMAGSSLAVYLEFSSYFPSRSGSEVVYLEQAYPRPKYFLPTVFAMQSVLFSFSSSNAIGMCTGSWENISDRLVLAQYLFRLAEAQSTPWKLKGVAVASIGITGLVVLGGHTKTEDPKANFRDAFAGSSSASVYGATNALVKVAFSYAGFENAFNVVNEVKNPVKTLRWSAPLSLLLVATLYMLANIAYFSAASKEEILGSKVVAASIFFQKVFGTSSASRALNFLICLSAFGNLLAVLIGQSRLLRECGRQGVLPFTKFWTSTRPFGTPLGPYALKWALTVLMILAPPAGDAFNFVVDLGVYPTNAFALFLAIGLLLTRRHRTRHNIPPSGYKAWNVVVGFSILSNLYMVVAPWYPPATGAKGGDVSFWYATYCVVGLGIIGLCGVYYYVYIKVLPRLGGYAFRQIVLQMEDGATAHKLVKVPKEQLKAWDAEHDATGRERAKDEAVSTAVDVKHDGV

SEQ ID NO: 157797 - DNA, 1614 bp, Aspergillus fumigatus Af293
  CDS (1)..(1614)
atgaacgacccggtaacagagtcgattcatcagaaaggcgccatgcctgaggacaagccgttcagcgagaccccacggagggtggacggagtctcccagttgtacgagggcaatgtttttgatgcgacaccagacgaccgtcggcagatcggcgtcgtcagtgcgtcttttctgatcttcaatcgtgtcattggtaccggtatctttgctactccggcaacaatcttgggattgtgtggtagcgttggtctatcgctcttcatgtgggttgcgggtactgctatcgccatggcgggtaccgcggtgtacttggaatggggtactgctattccgaagaacggcggcgagaagaattacctcgaatacgtctacagaaaacccaagttcctggctacggccatgtttgctgcgtacgctgtcttgctgggctgggctgcgagcaacagtgtcgtgtttggcgagtatatcctcaatgctgccgatgtggaggtcaatcggtggaatcagcgcggtattggattggcttgcgtcacagctgccttcctcatccacgctcttgctgtgaaatggggtctccgtctccagaacttgcttggtgtggtcaagctggtcattatcctatttgtcattgttgctggttgggtggcgctagccggtcacaccgaggccgagacgcctcataacttcaaaaatgcttttgagggcacaactggcagcggttatggtattgtcatggctttgtacaacgtcatctggtcgttcatcggatactccaacgccaactatgctctgagcgagacgaggaaccctgtacgcacgctgaagatcgcggcgccgatcgctatcggatccgtgggcattctctacatgctatgcaatatcgcctactttgctgccgtgtccaaggaagatatgctctcttcgggccaaacggtggcagccaaattcttcgggaatatgttcggcgcgcgtgcggagaaggtgatgtccgtcttcgtggcattgtcggcttttggaaatgtgttgtccgtgattttctcccaaggacgaattgtccaagaacttggccgtgagggtgttttgcccttctcgaggctttgggcgagtaacaagccgttccactcgccagctgctggtctgtttgagcactgggtcgtctcaatcatcattatgctggctcccccgccgggtgatgcatacaatttcctgctcaacctgatctcgtatcctctatccattgtgaacgtcttcgtatccggcggtctcatctatatttacctcacgcgttcaacacgctttcctgactgggctcccgggatccgcgcgacactcccagtcaccatcttcttcttcctatccaacatatacctggttattgcgccatacattccgccctcggagggaaagagtgtttacgaagaacttccctactatcttcactgtgtcgtggcgctcggcatctttgccttgggcgcaatatactacgtggtgtgggctattgtgatgccacgctttggtcgctacatgctggtaaaagaaaccgtggttgacgctgatggctggtccagaagcgttttcactcggctgccgctcgcggaagccgagcgagtttga

SEQ ID NO: 157798 - protein, 537 aa, Aspergillus fumigatus Af293
MNDPVTESIHQKGAMPEDKPFSETPRRVDGVSQLYEGNVFDATPDDRRQIGVVSASFLIFNRVIGTGIFATPATILGLCGSVGLSLFMWVAGTAIAMAGTAVYLEWGTAIPKNGGEKNYLEYVYRKPKFLATAMFAAYAVLLGWAASNSVVFGEYILNAADVEVNRWNQRGIGLACVTAAFLIHALAVKWGLRLQNLLGVVKLVIILFVIVAGWVALAGHTEAETPHNFKNAFEGTTGSGYGIVMALYNVIWSFIGYSNANYALSETRNPVRTLKIAAPIAIGSVGILYMLCNIAYFAAVSKEDMLSSGQTVAAKFFGNMFGARAEKVMSVFVALSAFGNVLSVIFSQGRIVQELGREGVLPFSRLWASNKPFHSPAAGLFEHWVVSIIIMLAPPPGDAYNFLLNLISYPLSIVNVFVSGGLIYIYLTRSTRFPDWAPGIRATLPVTIFFFLSNIYLVIAPYIPPSEGKSVYEELPYYLHCVVALGIFALGAIYYVVWAIVMPRFGRYMLVKETVVDADGWSRSVFTRLPLAEAERV

SEQ ID NO: 157799 - DNA, 1638 bp, Aspergillus fumigatus Af293
  CDS (1)..(1638)
atggatgattctgaaaatcaatcgctcctacaccccacgtccggtctgtatgaaactctttcctacgagtcgatccacgacatccggacaaatgggcgtccggtgtcgagccgcagcccaatccccgagacagccccctacggccgcaaccttacatggacgagcgcctatatcctggtgatatcgcgcgtcatcggcagtggcatcttcgcaaccccagggtcaattgtgaaatctgtgggaagcgttgggttggcgctcctggtatggctcgtggggaccgtgctcgcagcatgcggcctggctgtatcgatggagtttggctgtatgctccctcggtctggtggcgacaaggtctatctcgagtatacgtatcggcgtcctcggtttctggcgtcaacgttgatcgccgtgcaggcggttttattgggctttacggcgagcaactgcattatattctccaagtacacctggttcgctctgagctttgagccaacggagtcgcagcaaaaggctctggcggtaggccttatgactgcgattaccattgttcatgggtgcttcctgaaaaccggtatatggattcagaacctgctgggatggatgaagattttcatgattgccgcgatgacactgacggggctctgggtgatactctttcgccgggaggaaccctgcatgtccatgtcgaatgaggcgggcaggacaggatatgacgtctttctgtgggacaatttatggaaaggatcgaactggagctggagcttactttccacatcccttttcaaagtgttttactcgtatgctgggctgaataatgtgaacaacgtcctcaacgaagtccaggatccgatccggacagtcaaatctgtctgtccttccgctctcgtcacggcttgcggtctttacctactggcaaacatctcctactttctcgtcgtccccatcgacgagatcaagaacagtggggagctcgtcggggctctcctgttcgaacgcgttttcggtccgcatgttggcaggactctgttccctctggcgattgccatttccgccgcaggaaatgtcatggtagtcacgtttgcctgggcccgggtgaatcaggagattgctcgacagggctttctccctttcgcctccgtgctctcatcatctcgcccgttcaactctcctctgggcggcctgattgtccattatatcccttcgctcttggtgattgtacttccgccccccggagacgtctacaatttcattctcgacgttgagggctatccaggccagatcttcgccttggctattgcggttggcttgctggtcttgagacgacgtcagcctgatattacacgaccgttcaaggcatggcttcctgcggtctggctccgaatcatcgtgtgcgttgctctactggtggcgccctttattcctcctccagacagaaagggtgatgtgggctttttctacgcaacatacgcagtcgtgggcgtcggcattttactctttggggtgctttactggtacgtctggaccgttctccttccacggtggggggggtacagactcgaagaagacgtgactgtgctggacgatgggaccagcgttacgaagctcgtgccgtctcagaaccatgttcttctatag

SEQ ID NO: 157800 - protein, 545 aa, Aspergillus fumigatus Af293
MDDSENQSLLHPTSGLYETLSYESIHDIRTNGRPVSSRSPIPETAPYGRNLTWTSAYILVISRVIGSGIFATPGSIVKSVGSVGLALLVWLVGTVLAACGLAVSMEFGCMLPRSGGDKVYLEYTYRRPRFLASTLIAVQAVLLGFTASNCIIFSKYTWFALSFEPTESQQKALAVGLMTAITIVHGCFLKTGIWIQNLLGWMKIFMIAAMTLTGLWVILFRREEPCMSMSNEAGRTGYDVFLWDNLWKGSNWSWSLLSTSLFKVFYSYAGLNNVNNVLNEVQDPIRTVKSVCPSALVTACGLYLLANISYFLVVPIDEIKNSGELVGALLFERVFGPHVGRTLFPLAIAISAAGNVMVVTFAWARVNQEIARQGFLPFASVLSSSRPFNSPLGGLIVHYIPSLLVIVLPPPGDVYNFILDVEGYPGQIFALAIAVGLLVLRRRQPDITRPFKAWLPAVWLRIIVCVALLVAPFIPPPDRKGDVGFFYATYAVVGVGILLFGVLYWYVWTVLLPRWGGYRLEEDVTVLDDGTSVTKLVPSQNHVLL

SEQ ID NO: 157801 - DNA, 1704 bp, Neurospora crassa OR74A
  CDS (1)..(1704)
atgggcaccgacacaaaagggcccaagcccgtggcatctccggccagcagtgttgctgccagcgagatcctcgacgtcgacggctcacccatctcgggagagtctctgcaatatgctgtaccagagtcgaggaaaatcggtgtcacaggtgccgtgttcctgatcctaaacaagatgatcggaacaggcatcttctcaaccccatccagcatcttcgcttccactggctcggttggcgtgtgcctgttgatgtgggccgtcgctggtcttctgaccctgtccggactcagcgtctttctggaattcggcctggccatccccaaatcgggcggcgaaaagaactacctcgaacgagtataccggcaacccgtctatctcatcaccagcgtctttgctgttcagatcgttcttctcggcttctctgccggcaactcgctcgcttttggccgttatgtcttgctggccctaggatacaacctgcctgatggatggccggccaggaccattgccgtgctgtgcatcactttcgtcgtatttctccactccgtcttacccaaatgggggttgaggctcaccaacgcactcggcgtcttcaaagtcctagtcctgctattgattgtcttctcgggctttgctgccttggctggccatcgtcgagtccccgaccctcacaactttgacgacatgtggtctatcgaaaagggcgatggtttcgggggcggaggggcgtatgcatatgctactgccctccttcaggtcgtctacagctacaagggctgggagaatgccaactatgtcatgggcgagctgaagcatcccaagcggacactgtccatcgccgcgcccttggcggtcgttggcgtgaccatcctttacgttctcgccaacgtcgcttactttgctgccattcccaaagccgagctggccaagtctgaggtcatcgtggccgggcttttcttccgcaacatgtttggagagagcgcggcggccagaagtctcccggctcttgtggccttgagtaacattggcaatgtcttggccgtgagttttacacactcgcgggtgaaccaggagctggccaaggaaggcgttttacctgggagcaagttttgggcatccaccaagccgttcaacacgcctgctgcttcactattacttcattggatcgtgactgtcattgtcctggtcgggcctcctcccggacctgcctacaacttccttgtcaatctatacacctaccccggtgcctggatcaacggccttgtcgccggtggcctcatctacctccgcctcagcaagaccgaagaatggagttcaccgtggcgcacttggctaccagttatttttatctacctctgcctcaatatgttccttgccattacccccttcatccctcccaacgacgactggaatgccgacggctacccgtactacgctttcccccttgttggcaccggggtcctgggtctgggtgcagtatactgggtggtatggaccaaggttctgccccgctttgggggctatgaactcgtggccgagagggttcttgatgagaccggggcggaagtggtgcggtacagaaagctttccgcgaggaatgttccgtcttccgagggagagtcttccgaaagagactcactcctaagggaaaacactaccgcggaagcctcggcagatcacggcagttacggagctatacactag

SEQ ID NO: 157802 - protein, 567 aa, Neurospora crassa OR74A
MGTDTKGPKPVASPASSVAASEILDVDGSPISGESLQYAVPESRKIGVTGAVFLILNKMIGTGIFSTPSSIFASTGSVGVCLLMWAVAGLLTLSGLSVFLEFGLAIPKSGGEKNYLERVYRQPVYLITSVFAVQIVLLGFSAGNSLAFGRYVLLALGYNLPDGWPARTIAVLCITFVVFLHSVLPKWGLRLTNALGVFKVLVLLLIVFSGFAALAGHRRVPDPHNFDDMWSIEKGDGFGGGGAYAYATALLQVVYSYKGWENANYVMGELKHPKRTLSIAAPLAVVGVTILYVLANVAYFAAIPKAELAKSEVIVAGLFFRNMFGESAAARSLPALVALSNIGNVLAVSFTHSRVNQELAKEGVLPGSKFWASTKPFNTPAASLLLHWIVTVIVLVGPPPGPAYNFLVNLYTYPGAWINGLVAGGLIYLRLSKTEEWSSPWRTWLPVIFIYLCLNMFLAITPFIPPNDDWNADGYPYYAFPLVGTGVLGLGAVYWVVWTKVLPRFGGYELVAERVLDETGAEVVRYRKLSARNVPSSEGESSERDSLLRENTTAEASADHGSYGAIH

SEQ ID NO: 157803 - DNA, 1590 bp, Mycosphaerella pini
  CDS (1)..(1590)
atgaagtggtacagcaaggacaacattaccggcatcgccacggccgcttctgacgctggctcctcctatggaaaccatggcgacgaccttgctcaaggtggcctccaagatggcggcgcgcacccctccaaacgccaaatcggcgtcatctccgcttcctttctcatcttcaaccgcatgatcggcaccggcatttttgcaacaccctccggaatcctctccctgaccggctccgtgggcctctctcttgtcatgtgggtggcagggatgctcatcgccgcggccggcatggcagtatacttggagttcggaacagcgattccgaagaacggcggcgagaagaattatcttgagtacgtcttccgtagacctcgcttcgcagcgacgggattctacactggctacgtcctacttttaggatgggctggatcgaattcggttgttttcggggagtacattctcaacgcggcgaatgtcgaagtcggacgctggaaccagagaggtgtgggacttgcgtgtatcactgcggcgttcttgattcatggccttgcgctgaagtggggacttcgactccaaaatctgcttggtatcatcaagctcatcgtgattttgatcattgtcgtctccggctgggcggcgttgggcggagctctgaaaatcgagaaaccgcataacttcgacaatgcgtttgagggtacgacgggcagtgcgtatggcgttgtgacggcgctgtataatgtcatttggagttatatcggatactcgaacgccaactatgccctttcggagacgaggaatccagtcaagacgttgaggcttgcggcgccgttggcgttggggagtgtggcggtattgtatatgctggtcaacattgcgtactttgcggcggttccgaaggaggagattctatcatctggacggattctggctgcgtcatttttcaggaatgtatttggaggcagtgcggagagggctctgtcggtctttgtggcgctgtccgcgttcggaaacgtcttgagtgttatcttctcgcaagggagactggtacaagagctgggaagagagggtatcctcccgttctcaagattctgggcgtccaatcggccgttcaatgctccactggcaggtctcttcgagcattggcttgtctctgtcatcatcatgttggcgccacctccaggtgatgcatacaacttcatcctcaacgtcatctcctacccccttgccatcgtcaactccttcgttgcatccggcctgctctacctttactggaacaaggcagaatggaactggtcaccacccttcaaagcgacctggcctgttgcattgttcttctttctgagcaacgtctacctcgtggttgcacctttcgtaccgccgactgatggtaacgccatttacgagacgctgccgtactacctccactgtgtggttggatggggtatcattgctggtggtggcgtgtactggctgatgtgggcgattatcttgccaaagattggcaagtatgagcttgtgagagaggagcatgttgatgagctggatggatggtcgaggtaccagtttgtgaggaggccgttggcgaattaa

SEQ ID NO: 157804 - protein, 529 aa, Mycosphaerella pini
MKWYSKDNITGIATAASDAGSSYGNHGDDLAQGGLQDGGAHPSKRQIGVISASFLIFNRMIGTGIFATPSGILSLTGSVGLSLVMWVAGMLIAAAGMAVYLEFGTAIPKNGGEKNYLEYVFRRPRFAATGFYTGYVLLLGWAGSNSVVFGEYILNAANVEVGRWNQRGVGLACITAAFLIHGLALKWGLRLQNLLGIIKLIVILIIVVSGWAALGGALKIEKPHNFDNAFEGTTGSAYGVVTALYNVIWSYIGYSNANYALSETRNPVKTLRLAAPLALGSVAVLYMLVNIAYFAAVPKEEILSSGRILAASFFRNVFGGSAERALSVFVALSAFGNVLSVIFSQGRLVQELGREGILPFSRFWASNRPFNAPLAGLFEHWLVSVIIMLAPPPGDAYNFILNVISYPLAIVNSFVASGLLYLYWNKAEWNWSPPFKATWPVALFFFLSNVYLVVAPFVPPTDGNAIYETLPYYLHCVVGWGIIAGGGVYWLMWAIILPKIGKYELVREEHVDELDGWSRYQFVRRPLAN

SEQ ID NO: 157805 - DNA, 1674 bp, Aspergillus fumigatus (strain CEA10 / CBS 144.89 / FGSC A1163)
  CDS (1)..(1674)
atggggttccagtccaagtccgagcaacatggtgagtctgatgcttcgagcttgagcagtggtgacctgcaatacactgctcaagccggggccaactcctctgtgccaacctaccaagaagccagcggggcgccggtcgaaatcaactcaccgttgggatactcggtgggttggattactgtcgtctttctcaatctcagtaagatgatcggaaccggtgtcttttctaccccatcaactgtcctcaaaggcgccgggtccgttggcctggcattgttctactgggtcattggattcctcatggccggcagctcactggccgtctacctggagttctcgtcctatttccccagtcggtccggctcagaggtcgtctatctcgaacaggcgtatccgcgaccaaagtacttccttccgactgtttttgcaatgcaatcggtgttgttctcgtttagcagtagtaatgcgattggtatgtgcaccggttcctgggagaatatatctgaccgattagtcctcgcgcagtatcttttccgacttgcggaggcgcagtccacaccgtggaagctcaagggcgttgctgtcgcttccattggtatcaccggcctagttgtccttgggggacacaccaagatcgaagatcccaaggccaattttcgcgacgcctttgcgggtagttcctctgcctcggtgtatggtgccacaaacgccctggtcaaggtggccttctcgtacgcgggattcgaaaatgcgttcaacgtggtgaacgaagtcaagaatcctgtcaaaacgttgcgatggagcgcgccgctctccctcctgctcgtagcaaccctatacatgctcgccaacatcgcctatttctccgccgcatcaaaggaagagatcctcggctcaaaggtcgtggcggcgagtatcttcttccagaaagtcttcggcacgagcagcgcgtcacgagccctgaacttcttgatctgtctcagcgcgttcgggaacctgcttgccgttcttatcgggcagtcccgtctcctccgagaatgcggaagacaaggagtcctcccgttcaccaagttctggacctcgacccgtccattcggcacgccgcttgggccctacgcgctgaaatgggccttgaccgtcctcatgattttagctccaccagccggtgacgccttcaattttgtcgtcgacctgggcgtctaccccaccaatgcattcgccttattcctcgccattggactattgctcacccgtcgtcaccgtaaacggcacaacattccaccctctgggtacaaggcgtggaacgtggtcgtcggcttctccatcctctcgaatctgtacatggtagttgcgccgtggtatccgcccgcgacgggggcgaagggaggggatgtgagtttctggtatgcgacgtactgcgtcgtggggttgggaattatcgggctctgtggggtgtattactacgtctatatcaaggtgttgccgcggcttggcgggtatgcgttccggcagattgtcctgcaaatggaggacggggcgacggcgcataaattggtcaaggttccgaaggagcagttgaaggcatgggatgccgaacatgacgctacggggagagagcgagcgaaggatgaggccgttagtacagctgttgatgtcaagcatgatagcgtctag

SEQ ID NO: 157806 - protein, 557 aa, Aspergillus fumigatus (strain CEA10 / CBS 144.89 / FGSC A1163)
MGFQSKSEQHGESDASSLSSGDLQYTAQAGANSSVPTYQEASGAPVEINSPLGYSVGWITVVFLNLSKMIGTGVFSTPSTVLKGAGSVGLALFYWVIGFLMAGSSLAVYLEFSSYFPSRSGSEVVYLEQAYPRPKYFLPTVFAMQSVLFSFSSSNAIGMCTGSWENISDRLVLAQYLFRLAEAQSTPWKLKGVAVASIGITGLVVLGGHTKIEDPKANFRDAFAGSSSASVYGATNALVKVAFSYAGFENAFNVVNEVKNPVKTLRWSAPLSLLLVATLYMLANIAYFSAASKEEILGSKVVAASIFFQKVFGTSSASRALNFLICLSAFGNLLAVLIGQSRLLRECGRQGVLPFTKFWTSTRPFGTPLGPYALKWALTVLMILAPPAGDAFNFVVDLGVYPTNAFALFLAIGLLLTRRHRKRHNIPPSGYKAWNVVVGFSILSNLYMVVAPWYPPATGAKGGDVSFWYATYCVVGLGIIGLCGVYYYVYIKVLPRLGGYAFRQIVLQMEDGATAHKLVKVPKEQLKAWDAEHDATGRERAKDEAVSTAVDVKHDSV

SEQ ID NO: 157807 - DNA, 1725 bp, Saccharomyces cerevisiae (strain AWRI1631)
  CDS (1)..(1725)
atgtcggaaggaagaacgtttctgtcacagttgaatgtcttcaacaaggagaactatcaattttcttcttctactacaaaaaaggaagtaagtaactcgacagtggatgctgacaacggtgcctccgattttgaggcaggccagcaatttgctacagaattggaccaaggtgaaaagcagttaggtattttgtcgtgtattgggcttatctgtaatagaatgcttggtaccggtgttttcgccgtttcctcgaccatttacacactatgtgggtctgtggggcttgcattaattatgtgggcagttggcgccattattgccatttctgggttatatgtatacatggaattcggtacggctataccgaaaaatggtggtgaaaaaaactacctggaggctattttcaggaaaccaaaattcttcattacctgtatgtatgctgcgtatattttcttcctaggttgggctgctggtaattccatcaatacagctattatgtttttaactgctgctgatactgaagtgaccaaatggaatcaaagaggtattggtgtggccgtcgttttttttgcattcctaattaattctctgaatgtcaagattggtctatatttgcaaaacattttaggtattttcaagattggtattttcctcttcatttctattaccggttgggttgcccttggcggtggtctcaaagatggttatcaatctcacaactttcgtaatgcttttgaaggtactgaaaccgccactgcttatggtattgttaacgccttatatagtgttatttggtcgtttgtcggttactccaatgttaactatgcacttggtgaagttaagaaccctgtgagaactttgaagattgctggtcctacatcgatggtcttcttggctataatctacatttttgtgaacattgcttacttcgctgtggttccaaaagataagttaatttcttcaaaattgattttagctgctgacttcttcgatattgtgtttggcggccaagccaagagagcagcagccgcactggtcgggttgagtgccttaggaaatgttctttctgtcattttttctcagggtagaattattcaacaactaggacgtgaaggtgtgttgcccttttctaatttctttgcctcttctaagccattcaactccccaatggttggtttgtttcaacattttattgtttgtacagtaaccattttagccccacctccaggtgatgcatatttgctagtccaaaatttaatttcctacccaatgaatattattaattttgccattagcgcgggtttgctttggatatactggcaacgtagacaaggtaaaattgaatggaacccgccaattaaggccggtgtttttgttacgggatttttcacattatccaatttatacctgattattgctccttacgttccaccttcaaatggcgagtcggtgtattcaagcatgccatactggatccactgtgtaattgcttggggtattttcttctttggtggtgtttactacgttgtttgggcccaattattgccaagatggggccactacaaattggtttccaaggatgtgcttggtgaagatgggttctggagagtcaaaattgccaaagtttatgatgacactattggcgatgtcgatacacaagaagacggcgttattgaaacgaatataatcgaacattacaaaagtgaacaagaaaaatcgctgtaa

SEQ ID NO: 157808 - protein, 574 aa, Saccharomyces cerevisiae (strain AWRI1631)
MSEGRTFLSQLNVFNKENYQFSSSTTKKEVSNSTVDADNGASDFEAGQQFATELDQGEKQLGILSCIGLICNRMLGTGVFAVSSTIYTLCGSVGLALIMWAVGAIIAISGLYVYMEFGTAIPKNGGEKNYLEAIFRKPKFFITCMYAAYIFFLGWAAGNSINTAIMFLTAADTEVTKWNQRGIGVAVVFFAFLINSLNVKIGLYLQNILGIFKIGIFLFISITGWVALGGGLKDGYQSHNFRNAFEGTETATAYGIVNALYSVIWSFVGYSNVNYALGEVKNPVRTLKIAGPTSMVFLAIIYIFVNIAYFAVVPKDKLISSKLILAADFFDIVFGGQAKRAAAALVGLSALGNVLSVIFSQGRIIQQLGREGVLPFSNFFASSKPFNSPMVGLFQHFIVCTVTILAPPPGDAYLLVQNLISYPMNIINFAISAGLLWIYWQRRQGKIEWNPPIKAGVFVTGFFTLSNLYLIIAPYVPPSNGESVYSSMPYWIHCVIAWGIFFFGGVYYVVWAQLLPRWGHYKLVSKDVLGEDGFWRVKIAKVYDDTIGDVDTQEDGVIETNIIEHYKSEQEKSL

SEQ ID NO: 157809 - DNA, 1623 bp, Penicillium chrysogenum
  strain ATCC 28089 / DSM 1075 / Wisconsin 54-1255
  CDS (1)..(1623)
atggctgaacgggttgatcctgttgtcgaggcttccaataagtcgccggtattcgatacgaagccagcaggagacgatggcctccggcgcgcagatggtatctcgggattatatgaaggaaatgtcttcgaggcaacccccgacgatcgacgccagattggaattttcagcgcggccctcctaatctttaatcgggttattggcacgggtatttttgccacaccgagcactatccttgcattgtccggcagtgtcggtctctcattatttatgtgggttatcggcactgtaattgccctggctgggacggcagtgtatctagaatggggtactgcaattccgagaaacggaggcgaaaagaactacctcgaatacgtttatacaaaacccaaattcttggccactgccatgttcgccgcctatgctgtgttactcggatgggcagcaagtaacagcgtcgtcttcggtcaatatatcctcaacgcagcagatattgaggtcggacgatggaatcagcgtggaattggcatggcctgtctcaccgctgcctttcttatccactccgttgccttgaaatggggcattcgtcttcagaatgtccttggtattatcaagttggttattgtcttgttcatcattgttgctggttgggtggcacttggtggccatacaaaggctgagacgccggataacttcaccaatgccttcgaaggcaccaagggaagcggatacggaatcgtcatggccttgtacaacgttatctggtcctttgttggctattcaaatgccaactatgccttgagcgagaccaaaaaccctgcccgcacgttgaagattgcagcccccgtcgctatcattgctgttggcgttatgtatatgcttgtcaacatcgcctatttcgccgctgtatcaaaagaggaaatgctcgagtctggcagcattgtggccgccgtgttcttcagaaacatgttcggcggacaggccgaaaaagtcatgtcggtctttgtggctctttctgcatttggaaatgtgttatccgtcatattttcacaaggacgcattgttcaagagctcggacgtgaaggtgtcttgcccttttccaaggtctgggctagcaactggcctttccactcgccggctgctggcttgcttgagcactatctcgtctccgtcgttatcctgctcgccccgcctcccggtgacgcatacaacttcctcgtcaacctcatttcttaccccctcgcaatcgtcaacttcttcgtggccgctggcctcgttcatatctacctcaccaaagagaaaaactacccgaactggaagcccggagtccgtgccacgctacccgtcaccatcttcttcatgctgtccaacctctacctcgccgtcgcgccatatgtgccgcccagcgatggccagaatgtgtacgaagagctaccgtactacctgcactgtgtggtagccctggcgcttttcgcagccggaggaatctactacgttgtctgggcgatattgatgcctcggattggcgggtatgtgcttgtcaaggagtccgtcgtggatgccgatggatggtctcgcagtgcgtttacgaaactgccacaggcccaggcagtgcattcttaa

SEQ ID NO: 157810 - protein, 540 aa, Penicillium chrysogenum
  strain ATCC 28089 / DSM 1075 / Wisconsin 54-1255
MAERVDPVVEASNKSPVFDTKPAGDDGLRRADGISGLYEGNVFEATPDDRRQIGIFSAALLIFNRVIGTGIFATPSTILALSGSVGLSLFMWVIGTVIALAGTAVYLEWGTAIPRNGGEKNYLEYVYTKPKFLATAMFAAYAVLLGWAASNSVVFGQYILNAADIEVGRWNQRGIGMACLTAAFLIHSVALKWGIRLQNVLGIIKLVIVLFIIVAGWVALGGHTKAETPDNFTNAFEGTKGSGYGIVMALYNVIWSFVGYSNANYALSETKNPARTLKIAAPVAIIAVGVMYMLVNIAYFAAVSKEEMLESGSIVAAVFFRNMFGGQAEKVMSVFVALSAFGNVLSVIFSQGRIVQELGREGVLPFSKVWASNWPFHSPAAGLLEHYLVSVVILLAPPPGDAYNFLVNLISYPLAIVNFFVAAGLVHIYLTKEKNYPNWKPGVRATLPVTIFFMLSNLYLAVAPYVPPSDGQNVYEELPYYLHCVVALALFAAGGIYYVVWAILMPRIGGYVLVKESVVDADGWSRSAFTKLPQAQAVHS

SEQ ID NO: 157811 - DNA, 1617 bp, Penicillium marneffei (strain ATCC 18224 / CBS 334.59 / QM 7333)
  CDS (1)..(1617)
atgccgtcgaacgactcttcgctctatggaaatggcaaagagccaaagccatcagtcgacgctgaccttgcacagcgcgagggctctgaaatccaggatgcccaacagaggaatgttggcgaactcgcgttcgacgagtatacctctggtggtctgggacgacacctgggtgttttgtcgacgacttttctagtggttggccgtatcatcggcacaggtatcttctccacgccatcctccgtcactgcggaacttggcagtgtcggcgcatcgctcatgttctgggtccttggactcttcctggctgctgccggtctctgtgtctggctcgaattcgcttgcatgatcccgcgcagtggtggagagaagaattatctggaagccgtgtacaagaagcccaagctcttgattacaattttctttgccgtgcaagctattgcactaggattcaccgcatctggctgtgtcgttttcgcgcaatacatcctaacagccgccgacgtcaccgtcactgaatggggaaaacgtggtattgcaattggcgtcattgttttcatcactctgttccacacttttcttccaaaatggggtgttcgtggcatgaatgtaatcacaggcatcaagatcatagtcctgctattcatcgtggtgactggatgggtcgttctgggtggtggtgtgaagagtgttcctgatccacatgccagttttagaaatgcttttgctgggtcgaaccattcggggaacttgtatgccactgcgttgttcaaggttctgaacgcgtatgctggatggagcaacgccatgtacgtgttgaacgaggtccgagaccccgtgcgaacagtgaagattgcaggacctcttggtctgctcatttgcggtatcctttacattttcgccaacattgcgtactatgcagcggccacaccggaagaggtcgcaaaaagtggcgtgacaatagcagcttttttcatgtacaaagtattcggccatgcagctcaacgtgcattgagtgtacttctagcgatatctgcctttggaaacgttctcacagtgacattcgcccaatcgcgcgtcaaccaagaactcgccaaagaaggcgtaatccccttccccagattctgggcctccagctggccctttggctccccctcggccggcctgcttcttcacttcatcccatcctttatcgtcatcgtcgccatcccctttggagatgcctacaacttcatcctcgatcttgaaggttacccaagcagcgtagtcaacttcctcgttgtcttcggcttgttctacttacgattcaaagagccacacacccatcgctcattcaaagtctggtggcccattgcagcatttttcatggctgctcaggggttccagcttgtggctccgtttttgcgccctccaggtgggaagggagatacctctcttccgtattggttgtatgctgttgtcggtattgcagttttggcggcgtcgattgtctattggtttgtttggtgggtgttgttgcccaggattgggaaataccacttggagccaacgcatgagacgttgaaggatggtacgcatgtggtggtctataagtctgtcaagacttcttttaaatcctag

SEQ ID NO: 157812 - protein, 538 aa, Penicillium marneffei (strain ATCC 18224 / CBS 334.59 / QM 7333)
MPSNDSSLYGNGKEPKPSVDADLAQREGSEIQDAQQRNVGELAFDEYTSGGLGRHLGVLSTTFLVVGRIIGTGIFSTPSSVTAELGSVGASLMFWVLGLFLAAAGLCVWLEFACMIPRSGGEKNYLEAVYKKPKLLITIFFAVQAIALGFTASGCVVFAQYILTAADVTVTEWGKRGIAIGVIVFITLFHTFLPKWGVRGMNVITGIKIIVLLFIVVTGWVVLGGGVKSVPDPHASFRNAFAGSNHSGNLYATALFKVLNAYAGWSNAMYVLNEVRDPVRTVKIAGPLGLLICGILYIFANIAYYAAATPEEVAKSGVTIAAFFMYKVFGHAAQRALSVLLAISAFGNVLTVTFAQSRVNQELAKEGVIPFPRFWASSWPFGSPSAGLLLHFIPSFIVIVAIPFGDAYNFILDLEGYPSSVVNFLVVFGLFYLRFKEPHTHRSFKVWWPIAAFFMAAQGFQLVAPFLRPPGGKGDTSLPYWLYAVVGIAVLAASIVYWFVWWVLLPRIGKYHLEPTHETLKDGTHVVVYKSVKTSFKS

SEQ ID NO: 157813 - DNA, 1605 bp, Talaromyces stipitatus
  strain ATCC 10500 / CBS 375.48 / QM 6759 / NRRL 1006
  CDS (1)..(1605)
atggcgaatgattttccaccctatgataatggcaaagacttagtcgaggctgatgttgcacaacgcgatggctcagatctccaagatgcccggcagaagaatgtcggcgaactcgcgttcgaggagtatacggccggtggtctcggacgacacttaggggttttatcgacgacatttttagtggtcggccgtatcatcggtatcggcatcttctcgacaccatcttccgtcaccgcagaactcggcagtgtaggtgcatcactaatgttctgggccctcggatttcttctggctgctgccggtctttgcgtctggctcgaattcgcttctatgattccgcgcagtggtggagagaagaattacctggaagctgtgtacaagaaacccaagctcttgattaccattgtctttgccgtgcaggctatcgcgttagggtttaccgcatccggctgcgtcgttttcgcgcaatacatccttacggcagccgacgtcgcagtcaccgaatgggccaaacgtggtattgcaatcggcgtcattgtcttcgtcactctattccacacttttctcccaaaatggggtgttcgaggcatgaatgtgataacaatcatcaaggttattatcttgctgttcatcgtggtcactggatgggttgtgcttggtggtggtgtgaagaatgttcctgatccgcatgccagtttcagaaatgcgtttgctggatcgagccattcggggaatatgtatgcttctgccttgttcaaggtgttgaattcttatgctggctggagcaatgccatgtatgtgctaaacgaagtccgaaaccccgtgcggacagtcaagattgcaggtccccttggtctactcatttgcggtattctctacatctttgcaaacattgcgtactatgctgcagccacaccccacgaaatcgcaaagagcggcgtgacggtagcaggctatttcatgctcaaagtattcggtcacgcagcccaacgtgcattgagtgtcctcgtcgcaatatcagccttcggaaacgtcctcacaatcacattcgcccaatcccgggttaaccaagaactcgccaaagaaggtgtaatcccattccccaaattctgggcttccagctggccctttggttccccctctgcgggtcttttacttcacttcatcccttccttcatcgtaattatagccattcccttcggagacgcgtacaacttcatcctcgacctcgaaggctacccaggcagcgtaataaactttctcgtcgtcctgggactgttctatctccgaatcacgcaaccacacatccatcgtccattcaagatctggtggcccgttgcggcattcttcatggccgctcaggcttttcaacttgtcgccccctttttgcgtccgccaagcgggaaaggtgatacttcccttccgtattggttggctcctgttgtcgggattgcgattttggcggcttcagtggtttattggtttgtttggtgggttgtattaccacggattgggagatatcatttggaaccgaggcatgaaaccttgaaggatggtacgcatgtggtggtttataagtctgttaaaacttcttatagatcttga

SEQ ID NO: 157814 - protein, 534 aa, Talaromyces stipitatus
  strain ATCC 10500 / CBS 375.48 / QM 6759 / NRRL 1006
MANDFPPYDNGKDLVEADVAQRDGSDLQDARQKNVGELAFEEYTAGGLGRHLGVLSTTFLVVGRIIGIGIFSTPSSVTAELGSVGASLMFWALGFLLAAAGLCVWLEFASMIPRSGGEKNYLEAVYKKPKLLITIVFAVQAIALGFTASGCVVFAQYILTAADVAVTEWAKRGIAIGVIVFVTLFHTFLPKWGVRGMNVITIIKVIILLFIVVTGWVVLGGGVKNVPDPHASFRNAFAGSSHSGNMYASALFKVLNSYAGWSNAMYVLNEVRNPVRTVKIAGPLGLLICGILYIFANIAYYAAATPHEIAKSGVTVAGYFMLKVFGHAAQRALSVLVAISAFGNVLTITFAQSRVNQELAKEGVIPFPKFWASSWPFGSPSAGLLLHFIPSFIVIIAIPFGDAYNFILDLEGYPGSVINFLVVLGLFYLRITQPHIHRPFKIWWPVAAFFMAAQAFQLVAPFLRPPSGKGDTSLPYWLAPVVGIAILAASVVYWFVWWVVLPRIGRYHLEPRHETLKDGTHVVVYKSVKTSYRS

SEQ ID NO: 157815 - DNA, 1563 bp, Paracoccidioides brasiliensis Pb18
  CDS (1)..(1563)
atggcaaccgaggccaaccattggctgtctgggatatggcgatcttcaagcaatcaaaacttcaaggaagctgtcactccggcggaggaggaacagtcagagggttctgcacgacgtcagataggactcacgtcagctgtgttcctcatcttcaaccgcatgattggcactggaatctttgcgacgcctagtagtatctttgctctgtcaggtagtgttgggctgtccctgtttatttgggttgcgggcatgatcattgctgccgcgggcatggcggtatacattgaatttggaactgggattcctcgaaacggcggagaaaagaattacttggaatacgtgttccggaagccacggttcctgacatcgtgcatgtatgctggatatgtgtttttcctaggttgggcgggatctaactccgtcatctttggcgagtacatcctgcacgcagcgcaggtcgaggtaacacggtggaatcagcgaggtgttggacttgcttgcatcaccactgcaattttaatccacggccttgccttgaaatggggactgcgtctacaaaacctgctaggcactataaaactcattatcatcgttataattgccgtggcaggctgggctgcactgggaggcgctctcaaagttgagaagccgaacaacttccataatgcctttgaaggaaccaggggaagcgcatatggagtggtcacggccctatataatgtcatttggagctatattgggtacaacaatgccaattatgcattgagcgagactaagaatcctgtacggacgctgaagatcgccgcccctctcgcgctggggattgtgtcgacattgtacatgttggtaaatgttgcctatttcgctgcagtaccaaaggatgaaatactttcctccggccgtgttctggccgcatcctttttccgaaatgtttttggctccaaggctgaacgagcactatccgtcttcgtcgcgctctcagcttttggcaatgtgctcagtgttatcttctcgcaaggccgtttggtccaagagcttggtcgtgagggtattctcccattctctcggttatgggccagcaataaacccctcgacgcgcctctcgccggtcttttcgagcattggcttgtctcggtcattatcatgctagcacccccacctggtgatgcgtacaactttattcttaatgtaatctcataccccctttctatcatcaacaccttcgtcgccgccggccttatccacctctacctcaaccggtcaaaatacaactggaaccctcccgtcagagcgacgctgccagtggtaatcttctttggcctcagcaacatctttcttgtcattacaccctttgtacaacccgaagaaggccagaatgtctacaaccaactgccctactacctccattgcgttgtgggtatcgcgattgtggttgccggtggtatttactggctcatctgggcgcagttgttgccgtggctgggcaactatcggcttgagcaggaggcgtttgtgggagaggatgggtggaagaggaaggtgtttgtaaaatatgggaagtag

SEQ ID NO: 157816 - protein, 520 aa, Paracoccidioides brasiliensis Pb18
MATEANHWLSGIWRSSSNQNFKEAVTPAEEEQSEGSARRQIGLTSAVFLIFNRMIGTGIFATPSSIFALSGSVGLSLFIWVAGMIIAAAGMAVYIEFGTGIPRNGGEKNYLEYVFRKPRFLTSCMYAGYVFFLGWAGSNSVIFGEYILHAAQVEVTRWNQRGVGLACITTAILIHGLALKWGLRLQNLLGTIKLIIIVIIAVAGWAALGGALKVEKPNNFHNAFEGTRGSAYGVVTALYNVIWSYIGYNNANYALSETKNPVRTLKIAAPLALGIVSTLYMLVNVAYFAAVPKDEILSSGRVLAASFFRNVFGSKAERALSVFVALSAFGNVLSVIFSQGRLVQELGREGILPFSRLWASNKPLDAPLAGLFEHWLVSVIIMLAPPPGDAYNFILNVISYPLSIINTFVAAGLIHLYLNRSKYNWNPPVRATLPVVIFFGLSNIFLVITPFVQPEEGQNVYNQLPYYLHCVVGIAIVVAGGIYWLIWAQLLPWLGNYRLEQEAFVGEDGWKRKVFVKYGK

SEQ ID NO: 157817 - DNA, 1629 bp, Paracoccidioides brasiliensis Pb01
  CDS (1)..(1629)
atgtcgcaggtaccggaaattgggcctccattgtgcaaattgaattcttcaatagttgcgcagtcatctccggacagttcgaggcatgatggaagccgtgaaggcatggtcaagcggagctcagggagttcgggacctactgcagatccgttcgggacaagcgtgatggagcaatgccccgaaaaccggaggcagataggagtcatcagcgctgcctttttgatctttaataggatcatcggaacgggcatctttgcaacacctagcgcgattttggcgctcacgggtagtgtcgggctgtctttggtggtatggactgtgggctgggcagcaggcaacagcattgcctttggcgagtatgtccttcatgcggcgaacgttgaagtaaataggtggaatcaaagaggtataggccttgcgtgcattaccttggcctttgtcatacacgcaactgccgtcaaatggggtttacgcatgcagaatttctttggagccgtcaagttccttattgtcctcattattgttattggaggagctgtggctctcactggccatttaactattgagaagcctgataacttttctcggccttttgaggggagtataccaagtgtatatgggattgtcacggctctgtacagcgtgatatggtcatacattggttactcgaatgcaaattattcattgagcgagacaaaaaatccagctagaacattgaaaatcgcggcgcccataggcgttggccttgccggcgttctgtacatgcttgtcaatgtcgcatattttgccgctgtcccgaagaaggagattctgggttcaggccgtattcttgcggcctccttttttcgaaacgtatttggtcccaaggcagagcgggttctatcagtttttgtggcattgtgtgcgtttgggaacgtccagtctgttctcttttcccaaggtagagttatccaagaactgggccgggaaggagttttgccattttcgaagttctgggcaagcaatcgaccgtgtaattcgcccgcagcagggcttttcgagcattatgtcatatctgccgtagtaatgcttgctccacccccgggagatgcatataatttcttgctcaacttgatttcctatccgctttcggttgtgaacgtattcgtcactgctggtttgatacatatctacatgtttccgtcacgctaccctgactgggctccgaccatacgagccggccgaccaattacctttttcttcctggtttccaacattttccttgtagttgcaccatatcttccaccaccagataaggagcacaatgtctacgcgcacctgccctattatattcattgcgttgttggccttgggatctttgcggttgggatgatatactggattttctgggcatctttctatggagatgaactcatttgcatctacacacaaatcactcgtgagaatgattacgtaggtggaaaacggcccctcaaacttgctggtaattcatctcgcagaactgcaaaagtcttttacagagcatataaaagactgagcagtctgagacatagttacgtggttcaaactactggaatagtatccgcaggctgcctttttgttcgacgggagagcacaaaaaaagaatga

SEQ ID NO: 157818 - protein, 542 aa, Paracoccidioides brasiliensis Pb01
MSQVPEIGPPLCKLNSSIVAQSSPDSSRHDGSREGMVKRSSGSSGPTADPFGTSVMEQCPENRRQIGVISAAFLIFNRIIGTGIFATPSAILALTGSVGLSLVVWTVGWAAGNSIAFGEYVLHAANVEVNRWNQRGIGLACITLAFVIHATAVKWGLRMQNFFGAVKFLIVLIIVIGGAVALTGHLTIEKPDNFSRPFEGSIPSVYGIVTALYSVIWSYIGYSNANYSLSETKNPARTLKIAAPIGVGLAGVLYMLVNVAYFAAVPKKEILGSGRILAASFFRNVFGPKAERVLSVFVALCAFGNVQSVLFSQGRVIQELGREGVLPFSKFWASNRPCNSPAAGLFEHYVISAVVMLAPPPGDAYNFLLNLISYPLSVVNVFVTAGLIHIYMFPSRYPDWAPTIRAGRPITFFFLVSNIFLVVAPYLPPPDKEHNVYAHLPYYIHCVVGLGIFAVGMIYWIFWASFYGDELICIYTQITRENDYVGGKRPLKLAGNSSRRTAKVFYRAYKRLSSLRHSYVVQTTGIVSAGCLFVRRESTKKE

SEQ ID NO: 157819 - DNA, 1584 bp, Paracoccidioides brasiliensis Pb01
  CDS (1)..(1584)
atggcaaacgaggacaaccattggttgtctgggatatgtcgatcttcaagcaacaacagcttcaaggaagctgtcacttcggcggaggaggaacagtcagaggaaggtgatacatatcagatagattctgcacgacgtcagataggactcacgtcagccgtgttcctcatcttcaaccgcatgattggcactggaatctttgcgacacctagtagtatctttgctctgtcaggtagtgtggggctggccctgttcatttgggttgtgggcatgatcattgctgcctcgggcatggcggtatacagtgaatttgggaccgggcttcctcgaaacggcggagaaaagaattacttggaatacgtgtttcggaagccgcggttcctgacatcgtgcatgtatgctggatatgtgtttttcctaggttgggcgggatctaactctgtcatctttggcgagtacatcctacgcgcagcgcaggtcgaggtaacgcgttggaatcagcgaggtgttggacttgcttgcatcaccgctgcatttttaatccacggctttgccttgaaatggggactgcgtctacaaaacctgctaggcgctataaaactcattatcatcgttgtaattgccgtggcaggctgggctgcactgggaggcgctctcaaagttgagaagccgaacaacttccataatgcctttgaaggaaccaggggaagcgcgtatggagtggtcacggccctatatagtgtcatttggagctatgttgggtacaataatgccaattatgcgttgagcgagactaggaatcctgtacggacgctgaagattgccgcccctctcgcgctggggattgtatcgatattgtatatgttggtaaatgttgcctatttcgctgcagtaccaaaggaagaaatactttcctccggccgtgttcttgccgcatcctttttccgaaatgtttttggccccaaggctgaacgagcactatccgtcttcgtcgcgctctcagcttttggcaatgtgcttagtattatcttctcgcaaggccgtttggtccaagaacttggtcgtgagggtattctcccattctctcggttatgggccagcaataaacccttcgacgctcctctcgccggcctttttgagcactggcttgtctcggtcattatcatgctagttcccccacctggtgatgcgtacaactttattcttaatgtaatcttataccccgtttctatcatcaacaccttcgtcgccgccggccttattcacctctacctcaaccggtcgaaatacaactggaacccgcccgtcagagcgacgctgccagtggtaatcttctttggcctcagcaacatatttcttgttattgcgccctttaaacaacccgaagaaggccagaatgtctacaaccaactgccctactacctccattgcgttgtgggcattgcgattgtggttgccggtggtatttactggctcatctgggcgcagttgttgccgtggttgggcaactatcggcttgagcaggaggcgtttgtgggagaggatgggtgggagaggaaggtgcttgtaaaatatgggaagtaa

SEQ ID NO: 157820 - protein, 527 aa, Paracoccidioides brasiliensis Pb01
MANEDNHWLSGICRSSSNNSFKEAVTSAEEEQSEEGDTYQIDSARRQIGLTSAVFLIFNRMIGTGIFATPSSIFALSGSVGLALFIWVVGMIIAASGMAVYSEFGTGLPRNGGEKNYLEYVFRKPRFLTSCMYAGYVFFLGWAGSNSVIFGEYILRAAQVEVTRWNQRGVGLACITAAFLIHGFALKWGLRLQNLLGAIKLIIIVVIAVAGWAALGGALKVEKPNNFHNAFEGTRGSAYGVVTALYSVIWSYVGYNNANYALSETRNPVRTLKIAAPLALGIVSILYMLVNVAYFAAVPKEEILSSGRVLAASFFRNVFGPKAERALSVFVALSAFGNVLSIIFSQGRLVQELGREGILPFSRLWASNKPFDAPLAGLFEHWLVSVIIMLVPPPGDAYNFILNVILYPVSIINTFVAAGLIHLYLNRSKYNWNPPVRATLPVVIFFGLSNIFLVIAPFKQPEEGQNVYNQLPYYLHCVVGIAIVVAGGIYWLIWAQLLPWLGNYRLEQEAFVGEDGWERKVLVKYGK

SEQ ID NO: 157821 - DNA, 1710 bp, Candida glabrata
  CDS (1)..(1710)
atgtctgatttcttgtcacagttgaatatcttcaacaaagagaattacaaattctcgtcctcggagaagtctgaggatgatacgtctgatttcgagactggacagcagttcgccacggagctggaccaaggtgagaaaagactgggtcttatctcatgtattgggttgatctgtaacagaatgctgggaaccggtgtcttcgcggtttcttctacgatttacactctgagcggctccatcggtctggcgctgatcctgtgggctgtgggtgcgctcatcgccctggcaggtctatacgtatacatggaattcggtaccgctataccgagaaatggtggtgagaagaactacttggaagccatcttcaagaaaccaaagtttttcatcacatgcatgtatgcgtcctatgtttttttcctaggttgggccgcggggaactcagttaacaccgcggtgatgttcttgaccgccgctaacaccgaagtgactaagtggaaccaaagaggtattggtgtagctgtggtgttcttctgtttcgctgtcaactccatcaacgttagagccggtctgtacatccaaaatgtgctcggtgtcttcaagttgggtatcgttatcttcatctcaatcaccggctgggtggcccttgcaggtggtttgaagcacggataccagtcgcataacttccacaacgcgttcgaaggtaccaacaaggctaccgcttacggtgtggtcaacgccttgtacaatgtcatctggtccttcgtcggctactccaacgtaaattacgccctaggtgaagtcaaaaacccagtgagaactctaaagatcgcaggccctacttctttgatctgtttggccatcatctatatctttgtcaacatcgcatactttgctgtggttccaaaggataaactgatctcttccaagttgatcttggccgctgatttcttcgatatctgttttggtggtcatgctaagagagttgccgctgcccttgttggtctaagtgccctgggtaatgtcatgtcagtcatcttctcccaaggtagaattatccaacaacttggccgtgaaggtgtcttgccattctccaatttctttgctacatccaagcctttcaactccccaatggttggccttttccaacatttcatcatttgtatgatcactatcttggctcctcctccaggtgacgcttataacatcatcctgaacttgatctcttacccaatgaacattgtcaatttcgtgatctccgcgggtttgctatggatctactggcagagaagacaaggcaagattgaatggaacccacctattaaggccggcgtcttcattactactttcttcatgttgtctaatgtttacctgatcgtcgctccatatatcccaccaacccacggtgaaagcgtctacgagcacgctccatactggattcactgtgtggtcgcttggggtatcttcgcgtttggtggtttctactggttggtatgggccaaattactaccaagatggggccattacagattggaatccaaggaagtacttggtgatgatgggttctggagaatgcaaatcattaaagtcccagaaagtgaagtaggcgacgattcaattgattcttcagatggagagaatatccactctaatgatatcgaagtgctagattaccaagaaagtaaggaatcgcacaaaatatctcacgaataa

SEQ ID NO: 157822 - protein, 569 aa, Candida glabrata
MSDFLSQLNIFNKENYKFSSSEKSEDDTSDFETGQQFATELDQGEKRLGLISCIGLICNRMLGTGVFAVSSTIYTLSGSIGLALILWAVGALIALAGLYVYMEFGTAIPRNGGEKNYLEAIFKKPKFFITCMYASYVFFLGWAAGNSVNTAVMFLTAANTEVTKWNQRGIGVAVVFFCFAVNSINVRAGLYIQNVLGVFKLGIVIFISITGWVALAGGLKHGYQSHNFHNAFEGTNKATAYGVVNALYNVIWSFVGYSNVNYALGEVKNPVRTLKIAGPTSLICLAIIYIFVNIAYFAVVPKDKLISSKLILAADFFDICFGGHAKRVAAALVGLSALGNVMSVIFSQGRIIQQLGREGVLPFSNFFATSKPFNSPMVGLFQHFIICMITILAPPPGDAYNIILNLISYPMNIVNFVISAGLLWIYWQRRQGKIEWNPPIKAGVFITTFFMLSNVYLIVAPYIPPTHGESVYEHAPYWIHCVVAWGIFAFGGFYWLVWAKLLPRWGHYRLESKEVLGDDGFWRMQIIKVPESEVGDDSIDSSDGENIHSNDIEVLDYQESKESHKISHE

SEQ ID NO: 157823 - DNA, 24 bp, Artificial sequence
  primer
atgtcggaaggaagaacgtttctg

SEQ ID NO: 157824 - DNA, 26 bp, Artificial sequence
  primer
ttacagcgatttttcttgttcacttt

SEQ ID NO: 157825 - protein, 591 aa, Artificial sequence
  consensus sequence
  Variant (2)..(7): Xaa in position 2 to 7 is any amino acid
  Variant (9)..(10): Xaa in position 9 to 10 is any amino acid
  Variant (12)..(14): Xaa in position 12 to 14 is any amino acid
  Variant (16)..(28): Xaa in position 16 to 28 is any amino acid
  Variant (31)..(31): Xaa in position 31 is any amino acid
  Variant (33)..(37): Xaa in position 33 to 37 is any amino acid
  Variant (39)..(40): Xaa in position 39 to 40 is any amino acid
  Variant (41)..(42): Xaa in position 41 to 42 is any or no amino acid
  Variant (47)..(48): Xaa in position 47 to 48 is any amino acid
  Variant (50)..(51): Xaa in position 50 to 51 is any amino acid
  Variant (53)..(54): Xaa in position 53 to 54 is any amino acid
  Variant (56)..(60): Xaa in position 56 to 60 is any amino acid
  Variant (61)..(61): Xaa in position 61 is any or no amino acid
  Variant (63)..(64): Xaa in position 63 to 64 is any amino acid
  Variant (66)..(67): Xaa in position 66 to 67 is any amino acid
  Variant (69)..(69): Xaa in position 69 is any amino acid
  Variant (71)..(73): Xaa in position 71 to 73 is any amino acid
  Variant (75)..(76): Xaa in position 75 to 76 is any amino acid
  Variant (77)..(77): Xaa in position 77 is any or no amino acid
  Variant (82)..(82): Xaa in position 82 is any amino acid
  Variant (86)..(89): Xaa in position 86 to 89 is any amino acid
  Variant (90)..(90): Xaa in position 90 is any or no amino acid
  Variant (92)..(95): Xaa in position 92 to 95 is any amino acid
  Variant (96)..(99): Xaa in position 96 to 99 is any or no amino acid
  Variant (101)..(105): Xaa in position 101 to 105 is any amino acid
  Variant (108)..(111): Xaa in position 108 to 111 is any amino acid
  Variant (112)..(125): Xaa in position 112 to 125 is any or no amino acid
  Variant (127)..(130): Xaa in position 127 to 130 is any amino acid
  Variant (131)..(132): Xaa in position 131 to 132 is any or no amino acid
  Variant (134)..(134): Xaa in position 134 is any amino acid
  Variant (136)..(136): Xaa in position 136 is any amino acid
  Variant (138)..(144): Xaa in position 138 to 144 is any amino acid
  Variant (145)..(148): Xaa in position 145 to 148 is any or no amino acid
  Variant (150)..(151): Xaa in position 150 to 151 is any amino acid
  Variant (154)..(158): Xaa in position 154 to 158 is any amino acid
  Variant (159)..(170): Xaa in position 159 to 170 is any or no amino acid
  Variant (172)..(172): Xaa in position 172 is any amino acid
  Variant (174)..(177): Xaa in position 174 to 177 is any amino acid
  Variant (179)..(179): Xaa in position 179 is any amino acid
  Variant (182)..(183): Xaa in position 182 to 183 is any amino acid
  Variant (185)..(188): Xaa in position 185 to 188 is any amino acid
  Variant (189)..(194): Xaa in position 189 to 194 is any or no amino acid
  Variant (196)..(198): Xaa in position 196 to 198 is any amino acid
  Variant (200)..(200): Xaa in position 200 is any amino acid
  Variant (202)..(209): Xaa in position 202 to 209 is any amino acid
  Variant (210)..(216): Xaa in position 210 to 216 is any or no amino acid
  Variant (219)..(234): Xaa in position 219 to 234 is any amino acid
  Variant (235)..(240): Xaa in position 235 to 240 is any or no amino acid
  Variant (243)..(244): Xaa in position 243 to 244 is any amino acid
  Variant (246)..(247): Xaa in position 246 to 247 is any amino acid
  Variant (249)..(250): Xaa in position 249 to 250 is any amino acid
  Variant (252)..(253): Xaa in position 252 to 253 is any amino acid
  Variant (255)..(255): Xaa in position 255 is any amino acid
  Variant (258)..(258): Xaa in position 258 is any amino acid
  Variant (260)..(260): Xaa in position 260 is any amino acid
  Variant (262)..(263): Xaa in position 262 to 263 is any amino acid
  Variant (266)..(266): Xaa in position 266 is any amino acid
  Variant (267)..(267): Xaa in position 267 is any or no amino acid
  Variant (270)..(273): Xaa in position 270 to 273 is any amino acid
  Variant (275)..(283): Xaa in position 275 to 283 is any amino acid
  Variant (285)..(287): Xaa in position 285 to 287 is any amino acid
  Variant (289)..(289): Xaa in position 289 is any amino acid
  Variant (294)..(302): Xaa in position 294 to 302 is any amino acid
  Variant (304)..(307): Xaa in position 304 to 307 is any amino acid
  Variant (309)..(310): Xaa in position 309 to 310 is any amino acid
  Variant (313)..(315): Xaa in position 313 to 315 is any amino acid
  Variant (318)..(329): Xaa in position 318 to 329 is any amino acid
  Variant (330)..(330): Xaa in position 330 is any or no amino acid
  Variant (334)..(334): Xaa in position 334 is any amino acid
  Variant (338)..(339): Xaa in position 338 to 339 is any amino acid
  Variant (341)..(341): Xaa in position 341 is any amino acid
  Variant (343)..(345): Xaa in position 343 to 345 is any amino acid
  Variant (347)..(348): Xaa in position 347 to 348 is any amino acid
  Variant (350)..(352): Xaa in position 350 to 352 is any amino acid
  Variant (356)..(356): Xaa in position 356 is any amino acid
  Variant (357)..(357): Xaa in position 357 is any or no amino acid
  Variant (361)..(364): Xaa in position 361 to 364 is any amino acid
  Variant (365)..(365): Xaa in position 365 is any or no amino acid
  Variant (368)..(369): Xaa in position 368 to 369 is any amino acid
  Variant (372)..(373): Xaa in position 372 to 373 is any amino acid
  Variant (374)..(374): Xaa in position 374 is any or no amino acid
  Variant (376)..(378): Xaa in position 376 to 378 is any amino acid
  Variant (380)..(381): Xaa in position 380 to 381 is any amino acid
  Variant (383)..(391): Xaa in position 383 to 391 is any amino acid
  Variant (395)..(395): Xaa in position 395 is any amino acid
  Variant (402)..(407): Xaa in position 402 to 407 is any amino acid
  Variant (408)..(410): Xaa in position 408 to 410 is any or no amino acid
  Variant (413)..(416): Xaa in position 413 to 416 is any amino acid
  Variant (418)..(422): Xaa in position 418 to 422 is any amino acid
  Variant (425)..(439): Xaa in position 425 to 439 is any amino acid
  Variant (440)..(453): Xaa in position 440 to 453 is any or no amino acid
  Variant (455)..(460): Xaa in position 455 to 460 is any amino acid
  Variant (462)..(468): Xaa in position 462 to 468 is any amino acid
  Variant (469)..(469): Xaa in position 469 is any or no amino acid
  Variant (471)..(472): Xaa in position 471 to 472 is any amino acid
  Variant (473)..(506): Xaa in position 473 to 506 is any or no amino acid
  Variant (508)..(509): Xaa in position 508 to 509 is any amino acid
  Variant (512)..(518): Xaa in position 512 to 518 is any amino acid
  Variant (519)..(523): Xaa in position 519 to 523 is any or no amino acid
  Variant (526)..(529): Xaa in position 526 to 529 is any amino acid
  Variant (532)..(538): Xaa in position 532 to 538 is any amino acid
  Variant (540)..(541): Xaa in position 540 to 541 is any amino acid
  Variant (543)..(545): Xaa in position 543 to 545 is any amino acid
  Variant (547)..(550): Xaa in position 547 to 550 is any amino acid
  Variant (552)..(553): Xaa in position 552 to 553 is any amino acid
  Variant (554)..(568): Xaa in position 554 to 568 is any or no amino acid
  Variant (570)..(570): Xaa in position 570 is any amino acid
  Variant (572)..(572): Xaa in position 572 is any amino acid
  Variant (574)..(574): Xaa in position 574 is any amino acid
  Variant (575)..(589): Xaa in position 575 to 589 is any or no amino acid
GXXXXXXLXXNXXXGXXXXXXXXXXXXXTGXFXXXXXIXXXXGSVGXXLXXWXXGXXXXXXGXXVXXEXGXXXPXXXGGEKXYLEXXXXXPXXXXXXXXAXXXXXLGXXXXXXXXXXXXXXXXXXNXXXXXXYXLXAXXXXXXXXXXXWXXRGXXXXXXXXXXXXXXXXXKXGXXXXNXLGXXKXXXXXXXXXXGXXXLXGXXXXXXXXXXXXXXXNFXXXXXXXXXXXXXXXXXXXXXXALXXVXXSXXGXXNXNYXLXEXXNPXXTLXXXXPXXXXXXXXXYXXXNXAYFAXXXXXXXXXSXXXXAXXFFXXXFGXXXXXXXXXXXXXLSAXGNVXXVXFXXXRXXQXXXREGXXLPFXXXXXASXXPFXXXPXXXLXXHXXXXXXXXXAPPXGDAYNFXXXXXXXXXYPXXXXNXXXXXGLXXXXXXXXXXXXXXXXXXXXXXXXXXXXXAXXXXXXFXXXXXXXXLXXXXXXXXXXXXXXXXXXXXXXXXXXXXXXXXXXXXPXXPPXXXXXXXXXXXXPYXXXXVVXXXXXXXGXXYXXXWXXXXPXXXXXXXXXXXXXXXXXGXYXLXXXXXXXXXXXXXXXXDG

SEQ ID NO: 157826 - protein, 35 aa, Artificial sequence
  protein pattern
  Variant (2)..(5): Xaa in position 2 to 5 is any or no amino acid
  Variant (7)..(7): Xaa in position 7 is Phe or Tyr
  Variant (8)..(8): Xaa in position 8 is any amino acid
  Variant (10)..(10): Xaa in position 10 is any amino acid
  Variant (11)..(11): Xaa in position 11 is Glu, Asn or Ser
  Variant (13)..(13): Xaa in position 13 is Ala, Ile or Val
  Variant (14)..(14): Xaa in position 14 is Asn or Ser
  Variant (15)..(15): Xaa in position 15 is any amino acid
  Variant (16)..(16): Xaa in position 16 is Ala, Cys, Ser or Val
  Variant (17)..(17): Xaa in position 17 is Leu, Met or Val
  Variant (18)..(18): Xaa in position 18 is Gly, Asn or Ser
  Variant (20)..(22): Xaa in position 20 to 22 is any amino acid
  Variant (24)..(24): Xaa in position 24 is any amino acid
  Variant (25)..(25): Xaa in position 25 is Lys or Arg
  Variant (26)..(26): Xaa in position 26 is any amino acid
  Variant (27)..(27): Xaa in position 27 is Ile, Leu or Val
  Variant (28)..(29): Xaa in position 28 to 29 is any amino acid
  Variant (30)..(30): Xaa in position 30 is Ala, Ser or Val
  Variant (31)..(31): Xaa in position 31 is any amino acid
  Variant (33)..(33): Xaa in position 33 is any amino acid
  Variant (34)..(34): Xaa in position 34 is Ala, Gly or Ser
  Variant (35)..(35): Xaa in position 35 is Phe, Ile, Leu, Met or Val
YXXXXSXXGXXNXXXXXXEXXXPXXXXXXXXPXXX

SEQ ID NO: 157827 - protein, 26 aa, Artificial sequence
  protein pattern
  Variant (2)..(2): Xaa in position 2 is any amino acid
  Variant (3)..(3): Xaa in position 3 is Ala, Gly or Ser
  Variant (5)..(7): Xaa in position 5 to 7 is any or no amino acid
  Variant (9)..(9): Xaa in position 9 is any amino acid
  Variant (10)..(10): Xaa in position 10 is Ala, Ser, Thr or Val
  Variant (12)..(12): Xaa in position 12 is any amino acid
  Variant (14)..(14): Xaa in position 14 is Ala, Ser or Thr
  Variant (15)..(15): Xaa in position 15 is any amino acid
  Variant (16)..(16): Xaa in position 16 is Ala, Cys, Gly or Ser
  Variant (18)..(18): Xaa in position 18 is Ile, Leu or Val
  Variant (19)..(19): Xaa in position 19 is any amino acid
  Variant (21)..(21): Xaa in position 21 is Ala, Glu or Gln
  Variant (22)..(22): Xaa in position 22 is Phe, Ile or Leu
  Variant (23)..(23): Xaa in position 23 is Ala or Gly
  Variant (24)..(24): Xaa in position 24 is Lys or Arg
  Variant (25)..(25): Xaa in position 25 is Asp, Glu or Gln
  Variant (26)..(26): Xaa in position 26 is Gly or Asn
AXXNXXXVXXVXFXXXRXXQXXXXXX

SEQ ID NO: 157828 - protein, 14 aa, Artificial sequence
  protein pattern
  Variant (3)..(3): Xaa in position 3 is Asp or Glu
  Variant (5)..(5): Xaa in position 5 is Asn or Val
  Variant (9)..(10): Xaa in position 9 to 10 is any amino acid
  Variant (11)..(11): Xaa in position 11 is Phe or Tyr
  Variant (12)..(13): Xaa in position 12 to 13 is any amino acid
GGXKXYLEXXXXXP

SEQ ID NO: 157829 - protein, 27 aa, Artificial sequence
  protein pattern
  Variant (2)..(2): Xaa in position 2 is any amino acid
  Variant (4)..(4): Xaa in position 4 is Ile or Val
  Variant (5)..(5): Xaa in position 5 is Phe or Tyr
  Variant (6)..(6): Xaa in position 6 is Ala, Ser or Val
  Variant (7)..(7): Xaa in position 7 is Thr or Val
  Variant (8)..(8): Xaa in position 8 is Gly, Pro, Ser or Thr
  Variant (9)..(9): Xaa in position 9 is Ala, Gly or Ser
  Variant (10)..(10): Xaa in position 10 is any amino acid
  Variant (11)..(11): Xaa in position 11 is Ile or Val
  Variant (12)..(15): Xaa in position 12 to 15 is any amino acid
  Variant (20)..(21): Xaa in position 20 to 21 is any or no amino acid
  Variant (23)..(24): Xaa in position 23 to 24 is any amino acid
  Variant (25)..(26): Xaa in position 25 to 26 is any or no amino acid
GXGXXXXXXXXXXXXGSVGXXLXXXXW

SEQ ID NO: 157830 - protein, 34 aa, Artificial sequence
  protein pattern
  Variant (2)..(4): Xaa in position 2 to 4 is any or no amino acid
  Variant (7)..(7): Xaa in position 7 is any amino acid
  Variant (8)..(8): Xaa in position 8 is Ala or Val
  Variant (9)..(9): Xaa in position 9 is Ala, Ile or Val
  Variant (10)..(10): Xaa in position 10 is Pro, Ser or Thr
  Variant (11)..(13): Xaa in position 11 to 13 is any amino acid
  Variant (14)..(14): Xaa in position 14 is Phe, Ile, Leu, Met or Val
  Variant (15)..(16): Xaa in position 15 to 16 is any amino acid
  Variant (18)..(21): Xaa in position 18 to 21 is any amino acid
  Variant (23)..(23): Xaa in position 23 is Ala, Gly or Ser
  Variant (24)..(24): Xaa in position 24 is any amino acid
  Variant (25)..(25): Xaa in position 25 is Phe or Leu
  Variant (27)..(30): Xaa in position 27 to 30 is any amino acid
  Variant (32)..(33): Xaa in position 32 to 33 is any amino acid
  Variant (34)..(34): Xaa in position 34 is Ala, Gly, Ser, Thr or Val
AXXXYFXXXXXXXXXXSXXXXAXXXFXXXXGXXX

SEQ ID NO: 157831 - protein, 15 aa, Artificial sequence
  protein pattern
  Variant (3)..(3): Xaa in position 3 is any amino acid
  Variant (4)..(4): Xaa in position 4 is Ala, Asn, Gln or Ser
  Variant (5)..(5): Xaa in position 5 is any amino acid
  Variant (6)..(6): Xaa in position 6 is Phe, Ile or Val
  Variant (7)..(7): Xaa in position 7 is Ala or Asn
  Variant (8)..(9): Xaa in position 8 to 9 is any amino acid
  Variant (10)..(10): Xaa in position 10 is Ile, Leu or Val
  Variant (11)..(11): Xaa in position 11 is Ala, Ser, Thr or Val
  Variant (12)..(12): Xaa in position 12 is any amino acid
  Variant (15)..(15): Xaa in position 15 is Phe, Ile, Leu or Val
YPXXXXXXXXXXGLX

SEQ ID NO: 157832 - DNA, 1758 bp, SACCHAROMYCES CEREVISIAE
  CDS (1)..(1758)
atgatcacccaaactgagctagataactgcttacaatgggctcaaaataatggagccttcatcgatccgaaaatctcttttaggattacagaggatgctggtgttagtgcatttgtaaacgaaaaattctctcccaaacccgaccaagctttgattagggtacccgaaactctgctgatcacttcccagcaagctttatcagaattttcccaggctgctaatgaaaggagtcttttgaattccgtgacacagttgtacttgtcaaagttgaaatttggcaccgatgcagttcacctgaaatccttttacaaaccatatttagatgtgctacccttgcaccttccacaaccatatttttggtctactgatgaagtcatgaatttgcatggtacagacgtgtacttaactatgagagatacgctgaacaaactagtaaaggagtggaggatgctgttccaagctttatctattgaacactcttctcaagataagcagttcttgtctttattccaggagaataaagactctgccgtagtgccgttggaacagttctgcgcacacatcaatggatgtaaactagaagattcggaatggaactcgttcgtggcgtatctttggtcgtactgcatctttaattctagggcatttcctcgtgtcattttaggcagggccggtacagaccgcaccaatctgaacgaaggatttttgtatccaatagtagatttattaaaccataaaaacgatgtaccagtaagatgggagatgaatgaacaaaatgaactttgtttcatgtcgcagactaccacatttagtgcacaggatgaattgtttaataattatggtaatatttctaatgaaaaatgtttgttaaactacgggttttgggattcctcgaataagtttgacttctctaggttgactttaaagctaccatccaccttagttagcggtttgcccgtggattttaacaaatcaggtaattttgttactgacgatggagaaactaccattttacaatttagtttaaaaatttctgaaccattaccaccggttctactagcgttatttgcctacctaagtaaattaaagtctgaagaaactccaaccgtaaggagcgtattggaaggtattgatcaattaacatctgtagtatcccagagattgctgttttataagaattttaaaattaaaacttcttcgactcaaaaattacgccctcatgttattaaactaatcaaactatactatcaagataacaaaaaaattctgaacgccactactgagaaattgtccgttttacaaaaaaaaatatatagcaataataaggagttttctctgtcattcaagacaatttttaaaaacgacaaaatatttgccaattctctcttactggtatttggtgctataaattacgaagatttgatcacaaaagactgtcttaatgacgcattgttgctctggatagtcaaattaatcaacgataaaagtaataatcagggaggtttcattaaacaaaccttcaaagaagttagtgattcaattgtcattgaaaaagaagatgttatggagtttttgccgttctataaaaaatacttccctaatttatcggagagaattccagaaatttatagtgtcggtgattggggcataagacagttcattgtggcagatactgcgattgatagattggtttggatcaggaaatcaaataaagagcctatatttctaatgaagaaggcatacgacttacagatttag

SEQ ID NO: 157833 - protein, 585 aa, SACCHAROMYCES CEREVISIAE
MITQTELDNCLQWAQNNGAFIDPKISFRITEDAGVSAFVNEKFSPKPDQALIRVPETLLITSQQALSEFSQAANERSLLNSVTQLYLSKLKFGTDAVHLKSFYKPYLDVLPLHLPQPYFWSTDEVMNLHGTDVYLTMRDTLNKLVKEWRMLFQALSIEHSSQDKQFLSLFQENKDSAVVPLEQFCAHINGCKLEDSEWNSFVAYLWSYCIFNSRAFPRVILGRAGTDRTNLNEGFLYPIVDLLNHKNDVPVRWEMNEQNELCFMSQTTTFSAQDELFNNYGNISNEKCLLNYGFWDSSNKFDFSRLTLKLPSTLVSGLPVDFNKSGNFVTDDGETTILQFSLKISEPLPPVLLALFAYLSKLKSEETPTVRSVLEGIDQLTSVVSQRLLFYKNFKIKTSSTQKLRPHVIKLIKLYYQDNKKILNATTEKLSVLQKKIYSNNKEFSLSFKTIFKNDKIFANSLLLVFGAINYEDLITKDCLNDALLLWIVKLINDKSNNQGGFIKQTFKEVSDSIVIEKEDVMEFLPFYKKYFPNLSERIPEIYSVGDWGIRQFIVADTAIDRLVWIRKSNKEPIFLMKKAYDLQI

SEQ ID NO: 157834 - DNA, 1725 bp, Ashbya gossypii ATCC 10895
  CDS (1)..(1725)
atgacatcgggctatcaagttcaagaatgcctcgattgggccactgcaaatggtgcagttatagatgattcattggagttcaagatcacaaattcagggatatccgtcttcgtcaaatccaggatcgaaggcagaagccaaccgttaatatccatccccaagaagcttctgattaccagagagatggctatcaagtctttgggagagcttggttccaaaaacttgggacctaatgcgctaacccaactgtttttggccaagctgatgtttgcaacagacacggggccaaaggatgcagaacttcagcagtttttcaagccctatctgtctgtgttaccaacgcacaaggaaatgcacacaccatacttttggactaattcagagctactgcttctgcgtggcatggacatttatctgaaagcgaaaaagaatttgcggcagctggtgaacgagtggcacgagctggtgacggccggcgagttgcgtaacgatactaagttctatgatctatttaacagctctgaaaactttgacgcgggggagtacattagcaaccagttggctgacccaaccaccactgattggacagactttccggcatacctgtgggcgtcctctattttctcatcgagagcattcccaactcttattctaggcacaacaacggacctcaacgaggcattcttaaacccgatcattgatctactaaaccactcagccggtacaaatgtcacatggtcatacaatgagcaagtcgctgctgttacattctcaacggcacagacccttgaaacaggcgatgaactatacaacaactacggcgataaatccaatgatgagcttttgctgaattatgggtttgttcttcccaataacgagcatgacaaatccacactgtgtttcaggattcctagtgaaagtataagccaggcggcgcgcgtcggtgtaaatctacaggctgcctatattttcgatgacatgattagctacgagcttccagtgtctggagagctatcaccgtcgatagtcaatcttttctcatcattaaatatgttgaaatctgaagagtttctaaccgtgagaagtaccctggaagggctagatcagttatcatccattttgcagcaaaagattgaggctttaaagtcaccaacagcagccttgagtaatggctcgaaccataacgctgccaaacttttcaaactttataaagcatcccagaagaaaatcttccaagcagcgttcgagtcaattcctaaacttcagaaggaaatcataaaggcccataaacctctctctttcaaaagtgtactgaaaaatgatcgcctttttgcaaacagtgctttgcttgctttaggagttactagttatgacgatatgctcaagaagggaatggaaagaaggctcattttactctggctcgttcgggtggggaataagcaaagctataaaaacacagagtatcaactaccggatttcatccatacaatgttccaagaagttaagcgcaatatcgtagttgataaggatgacgttatggagtatatgaacttctacaaaagtttatttccccaactgggatcgaagatccccgaggtttatggaacaggtgactggtcaataaagcagtttatagttgctggtacagtcatggaccgcctaatgtggactagaggaacatctagagagccgttgttttttgagcgtaagccattccatcaataa

SEQ ID NO: 157835 - protein, 574 aa, Ashbya gossypii ATCC 10895
MTSGYQVQECLDWATANGAVIDDSLEFKITNSGISVFVKSRIEGRSQPLISIPKKLLITREMAIKSLGELGSKNLGPNALTQLFLAKLMFATDTGPKDAELQQFFKPYLSVLPTHKEMHTPYFWTNSELLLLRGMDIYLKAKKNLRQLVNEWHELVTAGELRNDTKFYDLFNSSENFDAGEYISNQLADPTTTDWTDFPAYLWASSIFSSRAFPTLILGTTTDLNEAFLNPIIDLLNHSAGTNVTWSYNEQVAAVTFSTAQTLETGDELYNNYGDKSNDELLLNYGFVLPNNEHDKSTLCFRIPSESISQAARVGVNLQAAYIFDDMISYELPVSGELSPSIVNLFSSLNMLKSEEFLTVRSTLEGLDQLSSILQQKIEALKSPTAALSNGSNHNAAKLFKLYKASQKKIFQAAFESIPKLQKEIIKAHKPLSFKSVLKNDRLFANSALLALGVTSYDDMLKKGMERRLILLWLVRVGNKQSYKNTEYQLPDFIHTMFQEVKRNIVVDKDDVMEYMNFYKSLFPQLGSKIPEVYGTGDWSIKQFIVAGTVMDRLMWTRGTSREPLFFERKPFHQ

SEQ ID NO: 157836 - DNA, 1740 bp, Vanderwaltozyma polyspora DSM 70294
  CDS (1)..(1740)
atgataagcaatcaagatttagacaatttcattaaatggagcaaggaaaatggtgctgtaatcgatgaaaggattgatttcagagtaaccaaatctacaggtatcagttgtttttccaacagtattataagcaaacaagaagattctctaattagtgtgccatctgatttaattatcaataggaaattagcagagaaatatatgggtgtaacttcaaaagaccttaagttatctacaaaaaatcctaattccttaaccatacttttcttttcaagtttaaaatttaatggtagttttggtaacggaataagaaataaattccttccatacttaaatattataccaattgagttagaccaaccgtatttttgggatcctaaaataattgaggtgatagaaggcactgatctattcctaatcatgaaaaataacttgattgaaatatttaatgaatgggaagaattgatggataaattagagttgtcaacagatgatccaatactaggtagttccataaatgaaaaaatattgtttgaatacgtttggaatttcagaaatcacggaaacaatgaaattcaatggaatagcttttacgcatatttatgggcctcttgtatatttagttcaagggcttttccagaattaataattgatacagatacctcaagtgatatcaacacagcatttttattcccagtagtcgatctattgaatcataagaatgacactaacgttagatggaattatcgtgatggcaacataagtttcaatgctttagataccatcagagaaaatgaagaagtgtttaataattatggagataaaacaaacgaagaattattactaagctacggatttgcgtatgaaaataatgtccatgatacgtctaggttgactttaagattggatccaacattaatcgccagtgcacttggcgatagggtaaagctatccaaaagggaatatcctaaacctgatactgttgaatttgagttgagtatgaatgttgatataccaaataaccttattaacttctttggttatttatgcaaactacagtcagaaaaaactaccacaattagaagcattcttgaaggttgtgatcaattgctttcaatttttaatcaaaaacttattatgttcaaggggttactaaaatttgatcaatcaaagctaaataattacaatacttctacattaaaacaagtaaagatatatttgacttctcaaagacgaatttttaactttaatatcgagtcgttacaaaaattgcagaagaaaattttaaagtcatcagaagaaaatatatcttttaaaagtatttttaaaagtgataaaacttttgctaattcaatgctgataaacagaggaattattaattatgaagatttagttaaaaaagatgctataagagaggcattgctattatgggtagtcagaatctctaatcatgaagcgtatcctaaaaaatttgacttttcattcccgaaatttattattgacatgtttctagagatcagtgaaaataaaataattgaaaaggaggatgttgaagaatttataccttattacaaagaattatttcctaagttatcagaaaagattcctgaagtatataatatagggaaatggggtattagacaattcataatagctgacactgttttagatagattaacttggataaaaattcctccaaatgaatcattctttatcaaaagacaagaatttaagctatag

SEQ ID NO: 157837 - protein, 579 aa, Vanderwaltozyma polyspora DSM 70294
MISNQDLDNFIKWSKENGAVIDERIDFRVTKSTGISCFSNSIISKQEDSLISVPSDLIINRKLAEKYMGVTSKDLKLSTKNPNSLTILFFSSLKFNGSFGNGIRNKFLPYLNIIPIELDQPYFWDPKIIEVIEGTDLFLIMKNNLIEIFNEWEELMDKLELSTDDPILGSSINEKILFEYVWNFRNHGNNEIQWNSFYAYLWASCIFSSRAFPELIIDTDTSSDINTAFLFPVVDLLNHKNDTNVRWNYRDGNISFNALDTIRENEEVFNNYGDKTNEELLLSYGFAYENNVHDTSRLTLRLDPTLIASALGDRVKLSKREYPKPDTVEFELSMNVDIPNNLINFFGYLCKLQSEKTTTIRSILEGCDQLLSIFNQKLIMFKGLLKFDQSKLNNYNTSTLKQVKIYLTSQRRIFNFNIESLQKLQKKILKSSEENISFKSIFKSDKTFANSMLINRGIINYEDLVKKDAIREALLLWVVRISNHEAYPKKFDFSFPKFIIDMFLEISENKIIEKEDVEEFIPYYKELFPKLSEKIPEVYNIGKWGIRQFIIADTVLDRLTWIKIPPNESFFIKRQEFKL

SEQ ID NO: 157838 - DNA, 1758 bp, Candida glabrata CBS 138
  CDS (1)..(1758)
atgagcgataagttggacgggctattggcctgggcccgggagaatggtgcacaactgagagaagattgcttggagtacaactatgacgagaagaaaggttaccatgtcttgatcaaagatatagatgccttgtgggagtttaaggatgccggtgttattacggttccaagaaagctatttataacaagacaactggcacaacagtacttcaaaattaatgaccaaaagctgtccactaaatacaacaataatccaaacggtttaacagagttcttcctgtcatatattacctttacgaaggagaacgagtatgaattctttcggccttacataaatattctacctaaattgaactcaatgagaatccacccatttttttggactaaagaagagttgcaattgataaagggatctgacctgttcttaacaataaagttcaaattgcttgcattatatgatgaatatagaaactacatgaaactttatgaatttggaaatggtgacctgtcaatcataaatggagatatacagctatcagatgatgaacttttcgctataattgagcatttacaacacatcttgaagaaatcgtcggacgccatcgaatggacatcttttgttgcatatgtttggtcaaaccttattttcttttcaagagcattccctagtttaatcactggtgaagataaaaaggagctaaacttagcattcctgttgccaattgtggacttattaaatcataataatactactaaagttagctggaattacagcgatgacacatttaattacacaaataaggacctggcatacttgaaaaatggtgatgaattgttcaataactacggtgaaaaatcaaacgtagattatttaatcagttatgggtttttaaactctcaggaaaacattcacaacagtgttaacttgacgttgagacttgacccaacattcataagtcaagcaaaagaacatgtggaaaatctagaaattgtctctaatgataccgtcttattcaagataagtaaaaacgaccctcttcctgtctctttagtacatttcttcggctacgttacaaaactaaaatcggaggagcatattaccttaaggtctattctagaggggtcagatcaattgattaatatcttaaagcaaaagcttgaatactccaaggaaaaggctaaaataagctctaattctgtacacagttctgtgggtaagattataaaacagtattttaatgaggagaagaaattgtttcagttcagtttagattccttgttgaaaaagcaaaaagacataatcagtgctgccaaggataatattgtctctttcaagtcgattttcaagtctgataaagtctttgcgaacagtttgctgctatcttacggtgtaactaaatatgaagatattctagctaaggatatggcaaacgaagcattattgttatgggtcgttagagcatcaaacaaagacgcatacaaagacgggttacgaactgtcaatattccaccatttgttttagaaacatttgaggagatctcaagaactatatctattgcaaaagacgatgttactgagtttttgtccatatataagaggctatttccaagtctgggtgataaaattccagaggtatacaaagttggtgaatggggtattaaacaatttattattgctgatgctttgattgatagacttgtatgggtcagagactcgaattctgaacctctctttatacagaaattaaccttccagtaa

SEQ ID NO: 157839 - protein, 585 aa, Candida glabrata CBS 138
MSDKLDGLLAWARENGAQLREDCLEYNYDEKKGYHVLIKDIDALWEFKDAGVITVPRKLFITRQLAQQYFKINDQKLSTKYNNNPNGLTEFFLSYITFTKENEYEFFRPYINILPKLNSMRIHPFFWTKEELQLIKGSDLFLTIKFKLLALYDEYRNYMKLYEFGNGDLSIINGDIQLSDDELFAIIEHLQHILKKSSDAIEWTSFVAYVWSNLIFFSRAFPSLITGEDKKELNLAFLLPIVDLLNHNNTTKVSWNYSDDTFNYTNKDLAYLKNGDELFNNYGEKSNVDYLISYGFLNSQENIHNSVNLTLRLDPTFISQAKEHVENLEIVSNDTVLFKISKNDPLPVSLVHFFGYVTKLKSEEHITLRSILEGSDQLINILKQKLEYSKEKAKISSNSVHSSVGKIIKQYFNEEKKLFQFSLDSLLKKQKDIISAAKDNIVSFKSIFKSDKVFANSLLLSYGVTKYEDILAKDMANEALLLWVVRASNKDAYKDGLRTVNIPPFVLETFEEISRTISIAKDDVTEFLSIYKRLFPSLGDKIPEVYKVGEWGIKQFIIADALIDRLVWVRDSNSEPLFIQKLTFQ

SEQ ID NO: 157840 - DNA, 1677 bp, Kluyveromyces lactis NRRL Y-1140
  CDS (1)..(1677)
atggttaaagaagcagctcttgaaagattgttggtccatgcaaagaagaataattgtgaaatcagtgatgatctagagtttcgaattgacccggtgactggtgtaggtgcatacttgaagcataagctacataataaggaagccctcataaagatatctcaagatttcattttaactaaggctgaagcgcttcaatactttgaaattgatagttgttcttcatcaaaccctaacgcgattactcagttgtatttaatcgcattgcagtccaatcagtcagcgaaatggcaaccttatttggacgtattgccatctttggacgatatttcgagccctttagtatggcagccgcatgaactagaaataattcgtggttctgacctatacataaaaaccaaacggaagcttgcctctttgctagacgaatggtatgagattttaacggaactgaatttgtgcagtgaaaaagcgaagaagtactatgaacttcaagatagagacaatatagctgttgagaaatgctattcagtggattcttttgctgcctatctgtgggcgcatttgatattttcttcgagggcttttccatccataatttatgataattcagcgggtttggaggagggctttcttctcccaatcgtcgatcttttaaatcacaaaagtgacacgaaggtacactggaagtcagaaggttcctttataacatttagttccgaggaaataattgaagccaagggtgaattgtataacaattatggtgataaatcaaacgaggagcttttgctcggatacggttttgcaattgattccaacccacatgatgccacgtctatatctttgaaactagatgaaaaaacactatctgaagcatcaaattacggtactgaaatcaacccgaacaacgtatctggtgattccgttagattcgatatttcattgaaagatccacttccagttccgttaattaagctctttggatttatctcaaaactaaaatcagagaaaaacattactgtacgtgccgtgcttgaaggtctagatcaactgtatgctttattacatcaaaagatagctattttcaaagctaagaccaaattcgaatcgcataatatccggaacgaatcgatcataaagaatgcaaaaatttacttaacaggacagcgaaggctttttcattcctctcaggaagaactgcaaagggaaatgaaagctattatgaagatttataaaccagtgtctttcaaatctatctacaagcttgaccctgagttttcgagcagtttatcgtcatgtttaaacgtctcatcctatgaagagcttgtcaagaaaggtcttgctcaacatgcacttttactctggattgtcaaagctcacaatgctaagttttataaaagtccccactcgccttcattcgttagcgatacctttaatgatgtcgagcgcaatatcacgatcgaaaaggacgatgtcttagaatacatgcaattttaccaagcgtttttccctaatctctcacagatgtttcctaaagtgtacagtgtaggaagttggtccataaaggacttcattatcgctggtgtggtgatggaccgtattgtatggttgagaatggcaagcaatgaatatttcctattcgaaaagcaaacatttgatttcaaaagatcctattcctaa

SEQ ID NO: 157841 - protein, 558 aa, Kluyveromyces lactis NRRL Y-1140
MVKEAALERLLVHAKKNNCEISDDLEFRIDPVTGVGAYLKHKLHNKEALIKISQDFILTKAEALQYFEIDSCSSSNPNAITQLYLIALQSNQSAKWQPYLDVLPSLDDISSPLVWQPHELEIIRGSDLYIKTKRKLASLLDEWYEILTELNLCSEKAKKYYELQDRDNIAVEKCYSVDSFAAYLWAHLIFSSRAFPSIIYDNSAGLEEGFLLPIVDLLNHKSDTKVHWKSEGSFITFSSEEIIEAKGELYNNYGDKSNEELLLGYGFAIDSNPHDATSISLKLDEKTLSEASNYGTEINPNNVSGDSVRFDISLKDPLPVPLIKLFGFISKLKSEKNITVRAVLEGLDQLYALLHQKIAIFKAKTKFESHNIRNESIIKNAKIYLTGQRRLFHSSQEELQREMKAIMKIYKPVSFKSIYKLDPEFSSSLSSCLNVSSYEELVKKGLAQHALLLWIVKAHNAKFYKSPHSPSFVSDTFNDVERNITIEKDDVLEYMQFYQAFFPNLSQMFPKVYSVGSWSIKDFIIAGVVMDRIVWLRMASNEYFLFEKQTFDFKRSYS

SEQ ID NO: 157842 - DNA, 1803 bp, Debaryomyces hansenii CBS767
  CDS (1)..(1803): transl_table=12
atgttagagcgaggcataggacattttttatcttgggccagagaaaacggtgcgtttttagattctagaatagagttccaatatagcaaacaaaaaggatattcggcactcatacatgatttcctgagtggtgaagaattgataaaggtacctaaacagatggttattgggcctcacctaaaagaacaatatttgcctgggattaattatgcacattcagattcttatttcaccaataatgaaatgacaatcttgttaatatcaaaattagcgttcgatacgtcgcttaatgataaccgcttcaaacagtattttgaaatcgtgcctaaagatttcaatatcccctatttttggaattcaaacgaaattgatttggtgaatggaaccgatcttgaattaattttcaaaacgaatttcagtaagctagttactgaatggcatgaacttatggagcagcttattcaagattcactggaggaaaagttcaagcagcaaatattacaagatatgaagttttacgacgataatattgctggaatatctttaaactatcatggtgaattatatgaatatttgaattgcgaaaacgagtcttggacaagcttcagaaattatctttggtcgtatagtattttaacttcaagaggtctcccatatatcttattgaaaaatgagataaccagggatgatatacagaaggcaatattagtaccaataattgacctcttgaatcataagaatgattataaagtaaaatggaatgggcttaaagagtcaaaaggaagtcatgtctcgtttcaaagtttcgaagagggagataaatttggtgaattatataataactatggtaataaatcaaatcttcaacttttacttggctatggttttgtgtctgaaaacaacaaatatgatgagacaagtatttccttaaaagtggactcacaagaactcattaaagaagcattgagatataaaattttgatgaatcaaaataatgataacaatgcagatattaggtacttgaaggatggaattaattttaaaattactgctgatgaagacttacctagtaatttagtcaatttttttgctattttaaggcaaatgaaatttgaaagacatgtcggaatatcgctaagaatgcaactcaatggcaccgctcatttaaaacaagttattgaaggaaaaatcctacttttgaaaagaaactttgtattggggcctcaagttaaaagtggtgtccatgaagtagttaaagtctacagaaacgagcaaagaaagctttttcagaataccttagagtctttgctaaaatatgaaaaaaccctcttagctgataataaggctcatttgctctcattgaagactatattaaaaaatgatgtatctttcaaatcttctttgatcaagatttttaaggtatcttcttatgaagaaatattaaaaaaaaaaattgtgaatgatgttgttcttctatggattgtaacactttccaaagagaaagtctccctgcgcaatccatatttcaataccctgataagaaatcaaataaactatatctattcacagattgaagaagtttctgaagcaatcgatgttaacgacgaagatgtagatgagtataaaccaaaagtttctacatatatatccgatatattacaaatttggcccgatatgttcaagaataaaatacactttatccggcgatatgtaattgctgatacagtttttgacaggcttagttattcaaggccaactaatggagaattatttattgttcaaaaagtcgaagcttttgcataa

SEQ ID NO: 157843 - protein, 600 aa, Debaryomyces hansenii CBS767
MLERGIGHFLSWARENGAFLDSRIEFQYSKQKGYSALIHDFLSGEELIKVPKQMVIGPHLKEQYLPGINYAHSDSYFTNNEMTILLISKLAFDTSLNDNRFKQYFEIVPKDFNIPYFWNSNEIDLVNGTDLELIFKTNFSKLVTEWHELMEQLIQDSLEEKFKQQILQDMKFYDDNIAGISLNYHGELYEYLNCENESWTSFRNYLWSYSILTSRGLPYILLKNEITRDDIQKAILVPIIDLLNHKNDYKVKWNGLKESKGSHVSFQSFEEGDKFGELYNNYGNKSNLQLLLGYGFVSENNKYDETSISLKVDSQELIKEALRYKILMNQNNDNNADIRYLKDGINFKITADEDLPSNLVNFFAILRQMKFERHVGISLRMQLNGTAHLKQVIEGKILLLKRNFVLGPQVKSGVHEVVKVYRNEQRKLFQNTLESLLKYEKTLLADNKAHLLSLKTILKNDVSFKSSLIKIFKVSSYEEILKKKIVNDVVLLWIVTLSKEKVSLRNPYFNTLIRNQINYIYSQIEEVSEAIDVNDEDVDEYKPKVSTYISDILQIWPDMFKNKIHFIRRYVIADTVFDRLSYSRPTNGELFIVQKVEAFA

SEQ ID NO: 157844 - DNA, 1758 bp, Saccharomyces cerevisiae (strain YJM789)
  CDS (1)..(1758)
atgatcacccaaactgagctagataactgcttacaatgggctcaaaataatggagccttcatcgatccgaaaatctcttttaggattacagaggatgctggtgttagtgcatttgtaaacgaaaaattatctcccaaacccgaccaagctttgattagggtacccgaaactctgctgatcacttcccagcaagctttatcagaattttcccaggctgctaatgaaaggagtcttttgaattccgtgacacagttgtacttgtcaaagttgaaatttggcaccgatgcagttcacctgaaatccttttacaaaccatatttagatgtgctacccttgcaccttccacaaccatatttttggtctactgatgaagtcatgaatttgcatggtacagacgtgtacttaactatgagagatacgctgaacaaactagtaaaggagtggaggatgctgttccaagctttatctattgaacactcttctcaagataagcagttcttgtctttattccaggagaataaagactctgccgtagtgccgttggaacagttctgcgcacacatcaatggatgtaaactagaagattcggaatggaactcgttcgtggcgtatctttggtcgtactgcatctttaattctagggcatttcctcgtgtcattttaggcagggccggtacagaccgcaccaatctgaacgaaggatttttgtatccaatagtagatttattaaaccataaaaacgatgtaccagtaagatgggagatgaatgaacaaaatgaactttgtttcatgtcgcagactaccacatttagtgcacaggatgaattgtttaataattatggtaatatttctaatgaaaaatgtttgttaaactacgggttttgggattcctcgaataagtttgacttctctaggttgactttaaagctaccatccaccttagttagcggtttgcccgtggattttaacaaatcaggtaattttgttactgacgatggagaaactaccattttacaatttagtttaaaaatttctgaaccattaccaccggttctactagcgttatttgcctacctaagtaaattaaagtctgaagaaactccaaccgtaaggagcgtattggaaggtattgatcaattaacatctgtagtatcccagagattgctgttttataagaattttaaaattaaaacttcttcgactcaaaaattacgccctcatgttattaaactaatcaaactatactatcaagataacaaaaaaattctgaacgccactactgagaaattgtccgttttacaaaaaaaaatatatagcaataataaggagttttctctgtcattcaagacaatttttaaaaacgacaaaatatttgccaattctctcttactggtatttggtgctataaattacgaagatttgatcacaaaagactgtcttaatgacgcattgttgctctggatagtcaaattaatcaacgataaaagtaataatcagggaggtttcattaaacaaaccttcaaagaagttagtgattcaattgtcattgaaaaagaagatgttatggagtttttgccgttctataaaaaatacttccctaatttatcggagagaattccagaaatttatagtgtcggtgattggggcataagacagttcattgtggcagatactgcgattgatagattggtttggatcaggaaatcaaataaagagcctatatttctaatgaagaaggcatacgacttacagatttag

SEQ ID NO: 157845 - protein, 585 aa, Saccharomyces cerevisiae (strain YJM789)
MITQTELDNCLQWAQNNGAFIDPKISFRITEDAGVSAFVNEKLSPKPDQALIRVPETLLITSQQALSEFSQAANERSLLNSVTQLYLSKLKFGTDAVHLKSFYKPYLDVLPLHLPQPYFWSTDEVMNLHGTDVYLTMRDTLNKLVKEWRMLFQALSIEHSSQDKQFLSLFQENKDSAVVPLEQFCAHINGCKLEDSEWNSFVAYLWSYCIFNSRAFPRVILGRAGTDRTNLNEGFLYPIVDLLNHKNDVPVRWEMNEQNELCFMSQTTTFSAQDELFNNYGNISNEKCLLNYGFWDSSNKFDFSRLTLKLPSTLVSGLPVDFNKSGNFVTDDGETTILQFSLKISEPLPPVLLALFAYLSKLKSEETPTVRSVLEGIDQLTSVVSQRLLFYKNFKIKTSSTQKLRPHVIKLIKLYYQDNKKILNATTEKLSVLQKKIYSNNKEFSLSFKTIFKNDKIFANSLLLVFGAINYEDLITKDCLNDALLLWIVKLINDKSNNQGGFIKQTFKEVSDSIVIEKEDVMEFLPFYKKYFPNLSERIPEIYSVGDWGIRQFIVADTAIDRLVWIRKSNKEPIFLMKKAYDLQI

SEQ ID NO: 157846 - DNA, 25 bp, Artificial sequence
  primer
atgatcacccaaactgagctagata

SEQ ID NO: 157847 - DNA, 25 bp, Artificial sequence
  primer
ctaaatctgtaagtcgtatgccttc

SEQ ID NO: 157848 - protein, 602 aa, Artificial sequence
  consensus sequence
  Variant (2)..(2): Xaa in position 2 is any amino acid
  Variant (5)..(6): Xaa in position 5 to 6 is any amino acid
  Variant (10)..(16): Xaa in position 10 to 16 is any amino acid
  Variant (17)..(17): Xaa in position 17 is any or no amino acid
  Variant (19)..(23): Xaa in position 19 to 23 is any amino acid
  Variant (24)..(24): Xaa in position 24 is any or no amino acid
  Variant (26)..(38): Xaa in position 26 to 38 is any amino acid
  Variant (39)..(43): Xaa in position 39 to 43 is any or no amino acid
  Variant (46)..(47): Xaa in position 46 to 47 is any amino acid
  Variant (49)..(52): Xaa in position 49 to 52 is any amino acid
  Variant (54)..(57): Xaa in position 54 to 57 is any amino acid
  Variant (59)..(72): Xaa in position 59 to 72 is any amino acid
  Variant (73)..(77): Xaa in position 73 to 77 is any or no amino acid
  Variant (79)..(80): Xaa in position 79 to 80 is any amino acid
  Variant (82)..(82): Xaa in position 82 is any amino acid
  Variant (84)..(87): Xaa in position 84 to 87 is any amino acid
  Variant (89)..(89): Xaa in position 89 is any amino acid
  Variant (91)..(97): Xaa in position 91 to 97 is any amino acid
  Variant (98)..(106): Xaa in position 98 to 106 is any or no amino acid
  Variant (109)..(112): Xaa in position 109 to 112 is any amino acid
  Variant (114)..(118): Xaa in position 114 to 118 is any amino acid
  Variant (119)..(121): Xaa in position 119 to 121 is any or no amino acid
  Variant (123)..(123): Xaa in position 123 is any amino acid
  Variant (126)..(128): Xaa in position 126 to 128 is any amino acid
  Variant (130)..(134): Xaa in position 130 to 134 is any amino acid
  Variant (136)..(136): Xaa in position 136 is any amino acid
  Variant (138)..(139): Xaa in position 138 to 139 is any amino acid
  Variant (141)..(145): Xaa in position 141 to 145 is any amino acid
  Variant (147)..(148): Xaa in position 147 to 148 is any amino acid
  Variant (150)..(151): Xaa in position 150 to 151 is any amino acid
  Variant (154)..(186): Xaa in position 154 to 186 is any amino acid
  Variant (187)..(205): Xaa in position 187 to 205 is any or no amino acid
  Variant (207)..(207): Xaa in position 207 is any amino acid
  Variant (210)..(210): Xaa in position 210 is any amino acid
  Variant (215)..(217): Xaa in position 215 to 217 is any amino acid
  Variant (220)..(220): Xaa in position 220 is any amino acid
  Variant (226)..(227): Xaa in position 226 to 227 is any amino acid
  Variant (229)..(238): Xaa in position 229 to 238 is any amino acid
  Variant (239)..(242): Xaa in position 239 to 242 is any or no amino acid
  Variant (245)..(245): Xaa in position 245 is any amino acid
  Variant (248)..(248): Xaa in position 248 is any amino acid
  Variant (254)..(258): Xaa in position 254 to 258 is any amino acid
  Variant (260)..(260): Xaa in position 260 is any amino acid
  Variant (262)..(280): Xaa in position 262 to 280 is any amino acid
  Variant (281)..(284): Xaa in position 281 to 284 is any or no amino acid
  Variant (287)..(287): Xaa in position 287 is any amino acid
  Variant (292)..(293): Xaa in position 292 to 293 is any amino acid
  Variant (296)..(298): Xaa in position 296 to 298 is any amino acid
  Variant (301)..(301): Xaa in position 301 is any amino acid
  Variant (305)..(308): Xaa in position 305 to 308 is any amino acid
  Variant (309)..(309): Xaa in position 309 is any or no amino acid
  Variant (311)..(312): Xaa in position 311 to 312 is any amino acid
  Variant (314)..(318): Xaa in position 314 to 318 is any amino acid
  Variant (320)..(341): Xaa in position 320 to 341 is any amino acid
  Variant (342)..(345): Xaa in position 342 to 345 is any or no amino acid
  Variant (347)..(349): Xaa in position 347 to 349 is any amino acid
  Variant (350)..(355): Xaa in position 350 to 355 is any or no amino acid
  Variant (357)..(363): Xaa in position 357 to 363 is any amino acid
  Variant (366)..(367): Xaa in position 366 to 367 is any amino acid
  Variant (369)..(371): Xaa in position 369 to 371 is any amino acid
  Variant (373)..(377): Xaa in position 373 to 377 is any amino acid
  Variant (382)..(384): Xaa in position 382 to 384 is any amino acid
  Variant (385)..(386): Xaa in position 385 to 386 is any or no amino acid
  Variant (388)..(388): Xaa in position 388 is any amino acid
  Variant (390)..(391): Xaa in position 390 to 391 is any amino acid
  Variant (395)..(395): Xaa in position 395 is any amino acid
  Variant (399)..(403): Xaa in position 399 to 403 is any amino acid
  Variant (405)..(409): Xaa in position 405 to 409 is any amino acid
  Variant (411)..(424): Xaa in position 411 to 424 is any amino acid
  Variant (425)..(428): Xaa in position 425 to 428 is any or no amino acid
  Variant (430)..(431): Xaa in position 430 to 431 is any amino acid
  Variant (433)..(433): Xaa in position 433 is any amino acid
  Variant (435)..(446): Xaa in position 435 to 446 is any amino acid
  Variant (448)..(448): Xaa in position 448 is any amino acid
  Variant (450)..(453): Xaa in position 450 to 453 is any amino acid
  Variant (455)..(455): Xaa in position 455 is any amino acid
  Variant (457)..(460): Xaa in position 457 to 460 is any amino acid
  Variant (462)..(463): Xaa in position 462 to 463 is any amino acid
  Variant (464)..(465): Xaa in position 464 to 465 is any or no amino acid
  Variant (469)..(469): Xaa in position 469 is any amino acid
  Variant (471)..(471): Xaa in position 471 is any amino acid
  Variant (473)..(473): Xaa in position 473 is any amino acid
  Variant (475)..(476): Xaa in position 475 to 476 is any amino acid
  Variant (478)..(479): Xaa in position 478 to 479 is any amino acid
  Variant (481)..(489): Xaa in position 481 to 489 is any amino acid
  Variant (492)..(495): Xaa in position 492 to 495 is any amino acid
  Variant (497)..(503): Xaa in position 497 to 503 is any amino acid
  Variant (507)..(507): Xaa in position 507 is any amino acid
  Variant (509)..(511): Xaa in position 509 to 511 is any amino acid
  Variant (513)..(520): Xaa in position 513 to 520 is any amino acid
  Variant (521)..(531): Xaa in position 521 to 531 is any or no amino acid
  Variant (533)..(536): Xaa in position 533 to 536 is any amino acid
  Variant (538)..(538): Xaa in position 538 is any amino acid
  Variant (540)..(543): Xaa in position 540 to 543 is any amino acid
  Variant (545)..(547): Xaa in position 545 to 547 is any amino acid
  Variant (549)..(549): Xaa in position 549 is any amino acid
  Variant (552)..(552): Xaa in position 552 is any amino acid
  Variant (554)..(557): Xaa in position 554 to 557 is any amino acid
  Variant (559)..(561): Xaa in position 559 to 561 is any amino acid
  Variant (564)..(564): Xaa in position 564 is any amino acid
  Variant (566)..(569): Xaa in position 566 to 569 is any amino acid
  Variant (571)..(572): Xaa in position 571 to 572 is any amino acid
  Variant (574)..(575): Xaa in position 574 to 575 is any amino acid
  Variant (577)..(577): Xaa in position 577 is any amino acid
  Variant (579)..(579): Xaa in position 579 is any amino acid
  Variant (581)..(582): Xaa in position 581 to 582 is any amino acid
  Variant (585)..(585): Xaa in position 585 is any amino acid
  Variant (587)..(590): Xaa in position 587 to 590 is any amino acid
  Variant (594)..(594): Xaa in position 594 is any amino acid
  Variant (596)..(596): Xaa in position 596 is any amino acid
  Variant (598)..(601): Xaa in position 598 to 601 is any amino acid
LXWAXXNGAXXXXXXXXFXXXXXXGXXXXXXXXXXXXXXXXXXLIXXPXXXXIXXXXAXXXXXXXXXXXXXXXXXXXNXXTXLXXXXLXFXXXXXXXXXXXXXXXXPYXXXXPXXXXXXXXPXFWXXXEXXXXXGXDXXLXXXXXLXXLXXEWXXXXXXXXXXXXXXXXXXXXXXXXXXXXXXXXXXXXXXXXXXXXXXXXXXXXWXSFXAYLWXXXIFXSRAFPXXIXXXXXXXXXXXXXXFLXPIXDLLNHXXXXXVXWXXXXXXXXXXXXXXXXXXXXXXXELXNNYGXXSNXXXLLXYGFXXXXXNXXDXXXXXLXXXXXXXXXXXXXXXXXXXXXXXXXXDXXXXXXXXXFXXXXXXXLPXXLXXXFXXXXXLKSEXXXXXTXRXXLEGXDQLXXXXXQXXXXXKXXXXXXXXXXXXXXXXXXKXXKXYXXXXXXXXXXXXEXLXXXXKXIXXXXKXXXXSFKXIXKXDXXFXXSXXXXXXXXXYEXXXXKXXXXXXXLLWXVXXXNXXXXXXXXXXXXXXXXXXXFXXXXFXEXXXXIXXXKXDVXEXXXXYXXXFPXLXXXXPXXYXXGXWXIXXFIXAXXXXDRLXWXRXXXXE

SEQ ID NO: 157849 - protein, 58 aa, Artificial sequence
  protein pattern
  Variant (2)..(5): Xaa in position 2 to 5 is any amino acid
  Variant (6)..(6): Xaa in position 6 is any or no amino acid
  Variant (8)..(8): Xaa in position 8 is any amino acid
  Variant (9)..(10): Xaa in position 9 to 10 is any or no amino acid
  Variant (12)..(12): Xaa in position 12 is Asp or Glu
  Variant (15)..(15): Xaa in position 15 is any amino acid
  Variant (17)..(17): Xaa in position 17 is Phe or Tyr
  Variant (18)..(18): Xaa in position 18 is Ile, Leu or Met
  Variant (19)..(19): Xaa in position 19 is Asn, Pro, Gln or Ser
  Variant (20)..(20): Xaa in position 20 is any amino acid
  Variant (22)..(24): Xaa in position 22 to 24 is any amino acid
  Variant (27)..(27): Xaa in position 27 is any amino acid
  Variant (29)..(29): Xaa in position 29 is Gly or Ser
  Variant (30)..(30): Xaa in position 30 is Asp, Glu, Gln or Ser
  Variant (31)..(31): Xaa in position 31 is any amino acid
  Variant (32)..(32): Xaa in position 32 is Phe or Ile
  Variant (34)..(34): Xaa in position 34 is Glu or Lys
  Variant (35)..(35): Xaa in position 35 is Ile or Val
  Variant (37)..(38): Xaa in position 37 to 38 is any amino acid
  Variant (40)..(40): Xaa in position 40 is any amino acid
  Variant (42)..(42): Xaa in position 42 is Gly or Ser
  Variant (44)..(44): Xaa in position 44 is Lys or Arg
  Variant (45)..(45): Xaa in position 45 is Asp or Gln
  Variant (48)..(48): Xaa in position 48 is Ile or Val
  Variant (50)..(50): Xaa in position 50 is Asp or Gly
  Variant (51)..(51): Xaa in position 51 is Ala, Thr or Val
  Variant (52)..(52): Xaa in position 52 is Ala, Leu or Val
  Variant (53)..(53): Xaa in position 53 is Ile, Leu or Met
  Variant (56)..(56): Xaa in position 56 is Ile or Leu
  Variant (57)..(57): Xaa in position 57 is any amino acid
EXXXXXIXXXKXDVXEXXXXYXXXFPXLXXXXPXXYXXGXWXIXXFIXAXXXXDRXXW

SEQ ID NO: 157850 - protein, 50 aa, Artificial sequence
  protein pattern
  Variant (2)..(2): Xaa in position 2 is any amino acid
  Variant (4)..(4): Xaa in position 4 is Ser or Thr
  Variant (6)..(6): Xaa in position 6 is any amino acid
  Variant (8)..(8): Xaa in position 8 is any amino acid
  Variant (10)..(11): Xaa in position 10 to 11 is any amino acid
  Variant (13)..(13): Xaa in position 13 is any amino acid
  Variant (14)..(14): Xaa in position 14 is Asn or Ser
  Variant (16)..(16): Xaa in position 16 is any or no amino acid
  Variant (18)..(24): Xaa in position 18 to 24 is any amino acid
  Variant (25)..(25): Xaa in position 25 is any or no amino acid
  Variant (28)..(28): Xaa in position 28 is Asp or Glu
  Variant (29)..(29): Xaa in position 29 is Ile or Leu
  Variant (30)..(30): Xaa in position 30 is Ile, Leu or Val
  Variant (31)..(31): Xaa in position 31 is any amino acid
  Variant (33)..(34): Xaa in position 33 to 34 is any amino acid
  Variant (35)..(35): Xaa in position 35 is Ala, Ile, Leu or Val
  Variant (36)..(36): Xaa in position 36 is Asn, Gln or Arg
  Variant (37)..(37): Xaa in position 37 is Asp, Glu or His
  Variant (38)..(38): Xaa in position 38 is Ala or Val
  Variant (39)..(39): Xaa in position 39 is Leu or Val
  Variant (43)..(43): Xaa in position 43 is Ile or Val
  Variant (45)..(45): Xaa in position 45 is any amino acid
  Variant (46)..(46): Xaa in position 46 is Ala, Ile or Leu
  Variant (47)..(49): Xaa in position 47 to 49 is any amino acid
  Variant (50)..(50): Xaa in position 50 is Asp, Glu or Lys
SXKXIXKXDXXFXXSXLXXXXXXXXYEXXXXKXXXXXXXLLWXVXXXXXX

SEQ ID NO: 157851 - protein, 24 aa, Artificial sequence
  protein pattern
  Variant (2)..(2): Xaa in position 2 is Asn or Thr
  Variant (3)..(3): Xaa in position 3 is Asp or Ser
  Variant (5)..(5): Xaa in position 5 is any amino acid
  Variant (6)..(6): Xaa in position 6 is Ala or Asn
  Variant (8)..(8): Xaa in position 8 is Leu or Val
  Variant (10)..(10): Xaa in position 10 is any or no amino acid
  Variant (12)..(12): Xaa in position 12 is any amino acid
  Variant (13)..(13): Xaa in position 13 is any or no amino acid
  Variant (15)..(15): Xaa in position 15 is Phe or Leu
  Variant (16)..(16): Xaa in position 16 is any amino acid
  Variant (19)..(19): Xaa in position 19 is Ala or Gly
  Variant (20)..(20): Xaa in position 20 is Phe or Leu
  Variant (22)..(22): Xaa in position 22 is any amino acid
  Variant (23)..(23): Xaa in position 23 is any or no amino acid
WXXFXXYXWXSXXIXXSRXXPXXI

SEQ ID NO: 157852 - protein, 30 aa, Artificial sequence
  protein pattern
  Variant (3)..(3): Xaa in position 3 is any amino acid
  Variant (5)..(5): Xaa in position 5 is any or no amino acid
  Variant (8)..(9): Xaa in position 8 to 9 is any amino acid
  Variant (12)..(14): Xaa in position 12 to 14 is any amino acid
  Variant (16)..(16): Xaa in position 16 is Ile or Leu
  Variant (17)..(17): Xaa in position 17 is Gly, Asn or Ser
  Variant (21)..(22): Xaa in position 21 to 22 is any amino acid
  Variant (23)..(23): Xaa in position 23 is Asp, Glu, Pro or Ser
  Variant (24)..(24): Xaa in position 24 is Asn, Gln or Ser
  Variant (25)..(25): Xaa in position 25 is Glu or Asn
  Variant (26)..(27): Xaa in position 26 to 27 is any amino acid
  Variant (28)..(28): Xaa in position 28 is Asp or His
  Variant (29)..(29): Xaa in position 29 is any amino acid
  Variant (30)..(30): Xaa in position 30 is Ser or Thr
ELXNXYGXXSNXXXLXXYGFXXXXXXXXXX

SEQ ID NO: 157853 - protein, 23 aa, Artificial sequence
  protein pattern
  Variant (2)..(2): Xaa in position 2 is any amino acid
  Variant (3)..(7): Xaa in position 3 to 7 is any or no amino acid
  Variant (10)..(10): Xaa in position 10 is Ile or Val
  Variant (16)..(16): Xaa in position 16 is any amino acid
  Variant (17)..(17): Xaa in position 17 is Ala, Asn or Ser
  Variant (18)..(18): Xaa in position 18 is Asp, Gly or Thr
  Variant (19)..(20): Xaa in position 19 to 20 is any amino acid
  Variant (22)..(22): Xaa in position 22 is any amino acid
LXXXXXXPIXDLLNHXXXXXVXW

SEQ ID NO: 157854 - protein, 28 aa, Artificial sequence
  protein pattern
  Variant (2)..(3): Xaa in position 2 to 3 is any or no amino acid
  Variant (6)..(6): Xaa in position 6 is any amino acid
  Variant (7)..(8): Xaa in position 7 to 8 is any or no amino acid
  Variant (10)..(10): Xaa in position 10 is Ile, Leu, Pro or Val
  Variant (12)..(12): Xaa in position 12 is Ala or Ser
  Variant (13)..(13): Xaa in position 13 is any amino acid
  Variant (17)..(17): Xaa in position 17 is any amino acid
  Variant (21)..(21): Xaa in position 21 is any amino acid
  Variant (22)..(22): Xaa in position 22 is Ala, Asn or Ser
  Variant (23)..(23): Xaa in position 23 is Ile, Leu or Val
  Variant (24)..(24): Xaa in position 24 is Phe, Leu or Val
  Variant (25)..(25): Xaa in position 25 is any amino acid
  Variant (27)..(27): Xaa in position 27 is Lys or Arg
  Variant (28)..(28): Xaa in position 28 is Ile or Leu
KXXSEXXXTXRXXLEGXDQLXXXXXQXX

SEQ ID NO: 157855 - protein, 34 aa, Artificial sequence
  protein pattern
  Variant (2)..(2): Xaa in position 2 is Phe or Tyr
  Variant (5)..(5): Xaa in position 5 is Asp, Asn, Ser or Thr
  Variant (6)..(8): Xaa in position 6 to 8 is any amino acid
  Variant (9)..(9): Xaa in position 9 is Ile, Leu or Val
  Variant (10)..(11): Xaa in position 10 to 11 is any amino acid
  Variant (12)..(12): Xaa in position 12 is Ile, Leu or Val
  Variant (13)..(13): Xaa in position 13 is any amino acid
  Variant (15)..(15): Xaa in position 15 is any amino acid
  Variant (17)..(17): Xaa in position 17 is Ile, Leu or Val
  Variant (18)..(18): Xaa in position 18 is any amino acid
  Variant (20)..(24): Xaa in position 20 to 24 is any amino acid
  Variant (25)..(27): Xaa in position 25 to 27 is any or no amino acid
  Variant (29)..(33): Xaa in position 29 to 33 is any amino acid
PXFWXXXXXXXXXGXDXXLXXXXXXXXLXXXXXE

SEQ ID NO: 157856 - protein, 10 aa, Artificial sequence
  protein pattern
  Variant (2)..(2): Xaa in position 2 is Ala or Ser
  Variant (3)..(3): Xaa in position 3 is any amino acid
  Variant (4)..(4): Xaa in position 4 is Ala, Glu or Asn
  Variant (8)..(8): Xaa in position 8 is any amino acid
  Variant (9)..(9): Xaa in position 9 is Ile or Leu
  Variant (10)..(10): Xaa in position 10 is Asp or Arg
WXXXNGAXXX

SEQ ID NO: 157857 - protein, 33 aa, Artificial sequence
  protein pattern
  Variant (2)..(5): Xaa in position 2 to 5 is any amino acid
  Variant (7)..(7): Xaa in position 7 is any amino acid
  Variant (8)..(8): Xaa in position 8 is Ala, Asn, Gln or Thr
  Variant (9)..(9): Xaa in position 9 is Asp, Glu, Gly or Ser
  Variant (10)..(10): Xaa in position 10 is Glu, Asn or Gln
  Variant (11)..(12): Xaa in position 11 to 12 is Lys or Arg
  Variant (13)..(13): Xaa in position 13 is Ile or Leu
  Variant (14)..(14): Xaa in position 14 is Phe or Leu
  Variant (15)..(16): Xaa in position 15 to 16 is any amino acid
  Variant (17)..(17): Xaa in position 17 is Ala, Asn, Ser or Thr
  Variant (18)..(18): Xaa in position 18 is any amino acid
  Variant (19)..(19): Xaa in position 19 is Asp or Glu
  Variant (20)..(20): Xaa in position 20 is any amino acid
  Variant (21)..(21): Xaa in position 21 is Ile or Leu
  Variant (22)..(25): Xaa in position 22 to 25 is any amino acid
  Variant (27)..(27): Xaa in position 27 is any amino acid
  Variant (29)..(32): Xaa in position 29 to 32 is any amino acid
  Variant (33)..(33): Xaa in position 33 is Glu or Lys
KXXXXYXXXXXXXXXXXXXXXXXXXKXIXXXXX

SEQ ID NO: 157858 - DNA, 90 bp, Saccharomyces cerevisiae
  CDS (1)..(90)
atgaaaatcaaattctcaagaggggctcgattttcagcgaccttttcttttgataagtaccctttcttgctatacgaggtggtccgataa

SEQ ID NO: 157859 - protein, 29 aa, Saccharomyces cerevisiae
MKIKFSRGARFSATFSFDKYPFLLYEVVR

SEQ ID NO: 157860 - DNA, 20 bp, Artificial sequence
  primer
atgaaaatcaaattctcaag

SEQ ID NO: 157861 - DNA, 21 bp, Artificial sequence
  primer
ttatcggaccacctcgtatag

SEQ ID NO: 157862 - DNA, 1089 bp, Saccharomyces cerevisiae; identical to SEQ ID NO: 41707
  CDS (1)..(1089)

SEQ ID NO: 157863 - protein, 362 aa, Saccharomyces cerevisiae; identical to SEQ ID NO: 41708

SEQ ID NO: 157864 - DNA, 1047 bp, Salmonella enterica subsp. enterica serovar Typhi; identical to SEQ ID NO: 41501
  CDS (1)..(1047): transl_table=11

SEQ ID NO: 157865 - protein, 348 aa, Salmonella enterica subsp. enterica serovar Typhi; identical to SEQ ID NO: 41502

SEQ ID NO: 157866 - DNA, 1038 bp, Yersinia pestis; identical to SEQ ID NO: 41535
  CDS (1)..(1038): transl_table=11

SEQ ID NO: 157867 - protein, 345 aa, Yersinia pestis; identical to SEQ ID NO: 41536

SEQ ID NO: 157868 - DNA, 1236 bp, Penicillium citrinum
  CDS (16)..(1155)
  misc_feature (343)..(343): y is t or c
acatattgaaacaatatgagacttctatttaatactctggctgtctcagcactagctgctacgagttatgcctctcccatcattcattcccgggcctccaacacgtcctataccaactctaatgggctgaaatttaaccatttcgacgcttctcttccaaatgtgactttgctggcaactggtggaactattgccggtacaagcgatgacaagactgctacggcaggatatgaatccggggctttagggataaataagattctttccggcatcccagaagtttatgacattgccaacgtcaatgcggtacagtttgacaatgtcaacagcggcgatgtctctycatctctcttactgaacatgacacatacccttcaaaagaccgtttgtgatgaccctacgatatctggcgccgtcatcacccatggcaccgataccctggaagaatctgccttcttcatcgatgcaacagtcaactgcggcaagccgattgtgttcgttggctcaatgcgaccttccaccgcaatctctgccgatggccctatgaatttgctccagggagtgactgtggccgctgacaaacaggctaagaaccgcggagcactagtcgtgctgaatgaccgcattgtctctgctttcttcgctacaaagacaaatgcgaatacaatggacactttcaaggcttatgaacaaggcagtcttggcatgattgtttcaaacaagccctacttctattatccggcagtcgagccaaacgcgaagcacgttgttcatcttgacgacgtggatgcgatcccccgtgtggatattctctacgcttacgaggacatgcatagcgactcccttcacagtgctatcaaaaatggagccaagggcatcgtggtcgccggcgagggcgcaggtggtatctccacggactttagtgataccatcgatgagattgcatcgaagcatcagattcccattatcctgagccacagaaccgtgaacggagaagttcctactgctgatattacgggtgatagcgcgaagactcgcattgcaagtggcatgtataacccccagcaggcgcgcgtcttgcttggactattgctcgcagaaggcaagaagtttgaggatattcgaactatcttcggaaaagctactgttgcctagacccacgtcatatattatgcccatacttgggaacacttgaaactgatagactaaattaattatattgtcgtttgttgccgg

SEQ ID NO: 157869 - protein, 379 aa, Penicillium citrinum
  misc_feature (110)..(110): The Xaa at location 110 stands for Pro, or Ser.
MRLLFNTLAVSALAATSYASPIIHSRASNTSYTNSNGLKFNHFDASLPNVTLLATGGTIAGTSDDKTATAGYESGALGINKILSGIPEVYDIANVNAVQFDNVNSGDVSXSLLLNMTHTLQKTVCDDPTISGAVITHGTDTLEESAFFIDATVNCGKPIVFVGSMRPSTAISADGPMNLLQGVTVAADKQAKNRGALVVLNDRIVSAFFATKTNANTMDTFKAYEQGSLGMIVSNKPYFYYPAVEPNAKHVVHLDDVDAIPRVDILYAYEDMHSDSLHSAIKNGAKGIVVAGEGAGGISTDFSDTIDEIASKHQIPIILSHRTVNGEVPTADITGDSAKTRIASGMYNPQQARVLLGLLLAEGKKFEDIRTIFGKATVA

SEQ ID NO: 157870 - DNA, 972 bp, Lactococcus lactis subsp. lactis Il1403; identical to SEQ ID NO: 41507
  CDS (1)..(972): transl_table=11

SEQ ID NO: 157871 - protein, 323 aa, Lactococcus lactis subsp. lactis Il1403; identical to SEQ ID NO: 41508

SEQ ID NO: 157872 - DNA, 996 bp, Campylobacter jejuni subsp. jejuni NCTC 11168; identical to SEQ ID NO: 41511
  CDS (1)..(996): transl_table=11

SEQ ID NO: 157873 - protein, 331 aa, Campylobacter jejuni subsp. jejuni NCTC 11168; identical to SEQ ID NO: 41512

SEQ ID NO: 157874 - DNA, 1044 bp, Deinococcus radiodurans R1; identical to SEQ ID NO: 41515
  CDS (1)..(1044): transl_table=11

SEQ ID NO: 157875 - protein, 347 aa, Deinococcus radiodurans R1; identical to SEQ ID NO: 41516

SEQ ID NO: 157876 - DNA, 1044 bp, Salmonella typhimurium LT2; identical to SEQ ID NO: 41523
  CDS (1)..(1044): transl_table=11

SEQ ID NO: 157877 - protein, 347 aa, Salmonella typhimurium LT2; identical to SEQ ID NO: 41524

SEQ ID NO: 157878 - DNA, 1104 bp, Ralstonia solanacearum GMI1000; identical to SEQ ID NO: 41525
  CDS (1)..(1104): transl_table=11

SEQ ID NO: 157879 - protein, 367 aa, Ralstonia solanacearum GMI1000; identical to SEQ ID NO: 41526

SEQ ID NO: 157880 - DNA, 999 bp, Brucella melitensis 16M; identical to SEQ ID NO: 41527
  CDS (1)..(999): transl_table=11

SEQ ID NO: 157881 - protein, 332 aa, Brucella melitensis 16M; identical to SEQ ID NO: 41528

SEQ ID NO: 157882 - DNA, 978 bp, Thermoanaerobacter tengcongensis MB4; identical to SEQ ID NO: 41531
  CDS (1)..(978): transl_table=11

SEQ ID NO: 157883 - protein, 325 aa, Thermoanaerobacter tengcongensis MB4; identical to SEQ ID NO: 41532

SEQ ID NO: 157884 - DNA, 999 bp, Brucella suis 1330
  CDS (1)..(999): transl_table=11
atgaagacaggcaggacggatcgccccagaattctcatcgtttccaccggcggaaccatcgcctcgcgttacgatccgcaaacggattcgctgttgagcgtttcgaccggaaacgaacttctatcctctctcggtgcgcttgcccctgcagtcgatgttgttcttgacgaattctgcaatcttggcagcaaccgcatcgatctcgatacatctttcaggcttgcgcatcatattgatgaacggctcagggaccgaaccgtcgacgggtgtgtggtcacacacggcacggacacgctggaggaaagcgcattcctcgcacagcttacgatatcctcgcgaaagccggtggtctttaccggagcccagcgcagcgcagacgaaccggatgccgacggaccacgcaatcttgccgacgcaatctccgttgccgcctcgcccgaggctcgcgatctcggcacgctcgtcgtcttcgccgggaaggtgctctcctctatcgacgcgacaaaaattcatacgtcgaagctcgaagcctatgatgcccccggatatgggccgctcggcgtggtggatcacggcgcggtattcatcacaagaaaaccgctgggctatccgatgattgccgcccattcgatcgaaactcgggtcgatctcatcacactcgcgatgggtgccgatggccgtctcatcgaagcggcgatcaattccggcacacacggcttcattctggaaacattcggccggggcaacgccacgcccgcagttgtcgatgccgtcgcccgagcaacggaacggggcatcgtaacaatcatcacctcgcgctgcccggatggccgggtgctgcctgtctacggcgatggaggcggaagcgaccttgaaaaggccggagcaatcttcgccggtcggctgaacggccccaaagcacgaattctcctttgtctgtcattgccaaccatccctgttgaggagctaggccgcctttttgagcagtttggacgataa

SEQ ID NO: 157885 - protein, 332 aa, Brucella suis 1330
MKTGRTDRPRILIVSTGGTIASRYDPQTDSLLSVSTGNELLSSLGALAPAVDVVLDEFCNLGSNRIDLDTSFRLAHHIDERLRDRTVDGCVVTHGTDTLEESAFLAQLTISSRKPVVFTGAQRSADEPDADGPRNLADAISVAASPEARDLGTLVVFAGKVLSSIDATKIHTSKLEAYDAPGYGPLGVVDHGAVFITRKPLGYPMIAAHSIETRVDLITLAMGADGRLIEAAINSGTHGFILETFGRGNATPAVVDAVARATERGIVTIITSRCPDGRVLPVYGDGGGSDLEKAGAIFAGRLNGPKARILLCLSLPTIPVEELGRLFEQFGR

SEQ ID NO: 157886 - DNA, 1047 bp, Shigella flexneri 2a str. 301; identical to SEQ ID NO: 41539
  CDS (1)..(1047): transl_table=11

SEQ ID NO: 157887 - protein, 348 aa, Shigella flexneri 2a str. 301; identical to SEQ ID NO: 41540

SEQ ID NO: 157888 - DNA, 1140 bp, Bradyrhizobium japonicum USDA 110; identical to SEQ ID NO: 41547
  CDS (1)..(1140): transl_table=11

SEQ ID NO: 157889 - protein, 379 aa, Bradyrhizobium japonicum USDA 110; identical to SEQ ID NO: 41548

SEQ ID NO: 157890 - DNA, 975 bp, Lactobacillus plantarum WCFS1
  CDS (1)..(975): transl_table=11
ttgaagaagattttggtattacacactggtggcaccattgcgatgtcggccgatgaatccggcaatgtgacccccggagatgaaaatcctttagacaattatcagagttcatttggcacggatattgagttagagactgaggacgtctttaacgtgccgtcgccgcacatcaccccggcacggatgttgcagttaaagcaacggatcgataaggccgcacacgaaggggtcgatggggtggttgtgactcacggtacggatacgctagaagaaacggcgtattttctagatcttactttaccgaatgagctccccgttgtgattaccggcgcaatgcggtccgccaatgagattgggtcggatggtctgcataatctcgaaacggcgattcaaacggctagtacaccggatgcggccgaaaaaggtgttttagtggttatgaatgatgaaatccactcggcccgctacgtcactaagacgcatacgaccaacgtggccacttttagaacaccgacttttggcccgattgggttagtcgctaataaaggcattgtcttttttgaatcattactacgatcaacggtttgcccgattcaaacggtcacggataatgtttttctgatcaaagcatatgccgggatgggaccagaactatttgacgccattgcacaacccacgactcatggcgtagtcattgaagcattgggagcggggaatttgccaccggcgacgttaccagctgtgcaaaaattattagacatgcagattccggttgtactggtttcccggtgcttcaacggtatcgctcaggatgtctatgcttatgaaggtggcggtgttcaattgaaacaaatgggtgtgattttttgtcagggattgaatggacaaaaagcccggattaagttactggtgggtgtcagtgccggtatgtcgaccgatgagctagctcgatttgtagcgactgccaattcataa

SEQ ID NO: 157891 - protein, 324 aa, Lactobacillus plantarum WCFS1
MKKILVLHTGGTIAMSADESGNVTPGDENPLDNYQSSFGTDIELETEDVFNVPSPHITPARMLQLKQRIDKAAHEGVDGVVVTHGTDTLEETAYFLDLTLPNELPVVITGAMRSANEIGSDGLHNLETAIQTASTPDAAEKGVLVVMNDEIHSARYVTKTHTTNVATFRTPTFGPIGLVANKGIVFFESLLRSTVCPIQTVTDNVFLIKAYAGMGPELFDAIAQPTTHGVVIEALGAGNLPPATLPAVQKLLDMQIPVVLVSRCFNGIAQDVYAYEGGGVQLKQMGVIFCQGLNGQKARIKLLVGVSAGMSTDELARFVATANS

SEQ ID NO: 157892 - DNA, 1065 bp, Vibrio parahaemolyticus RIMD 2210633; identical to SEQ ID NO: 41549
  CDS (1)..(1065): transl_table=11

SEQ ID NO: 157893 - protein, 354 aa, Vibrio parahaemolyticus RIMD 2210633; identical to SEQ ID NO: 41550

SEQ ID NO: 157894 - DNA, 1059 bp, Bacteroides thetaiotaomicron VPI-5482; identical to SEQ ID NO: 41553
  CDS (1)..(1059): transl_table=11

SEQ ID NO: 157895 - protein, 352 aa, Bacteroides thetaiotaomicron VPI-5482; identical to SEQ ID NO: 41554

SEQ ID NO: 157896 - DNA, 975 bp, Bacillus anthracis str. Ames
  CDS (1)..(975): transl_table=11
ttgaaaagaatcctagttttacacacaggtggaacaattgcaatggaggaagataaagaaactggggtcgtacaaccaggtgaaaaaaatcctcttttaaaattcattcctgatttagaaggcgatgttgatttaatcgttgaagatgtgttccatctaccatctcctcatatgacaccaagcgaaatgttacaattacaagtcatcattgatgaaagagtaaaacaagacaacattcatggcgtagtcattacgcatggtacggatacattagaagaaacagcctatttcttagatttaacagtacaagcaactattccgatcgttgtaacaggtgcaatgcgatctagtaatgaattaggtgctgatggtctatataacttcttatcagctgtaaaagtcgctagcagtagtgaagccgcagaaaaaggtgttttagtcgtattaaacgacgaaattcattgcgctacaaacgtaacgaaaacacatacaagcaatgtagcaacattccaaagtccacagtatggaccaattggtatggtaacaaaacgcggtgttgtattccaccatgctttagtacatcacgaaacatattcagtaaataaggtttctaaaaacgtagtcgttctaaaagcatacgcaggcatggacgatacattgttagcagcaattgaaaaccttccagtagacgggattgttattgaagcactcggacaaggtaatttacctccaagaacacttcctagtctagaacgattaataaacaaaggaattcctgtcgtattagtttctcgctgtttcaacggcatcgttcaagatgtatattcatatgaaggcggcggcaaacaattaaaagatatgggtattgtattcacatacggtttaaatgctcaaaaagcacgtattaaattattagttgcattagagaatacaacttctcatgaagcaatccaaaatatgtttatgcacgattaa

SEQ ID NO: 157897 - protein, 324 aa, Bacillus anthracis str. Ames
MKRILVLHTGGTIAMEEDKETGVVQPGEKNPLLKFIPDLEGDVDLIVEDVFHLPSPHMTPSEMLQLQVIIDERVKQDNIHGVVITHGTDTLEETAYFLDLTVQATIPIVVTGAMRSSNELGADGLYNFLSAVKVASSSEAAEKGVLVVLNDEIHCATNVTKTHTSNVATFQSPQYGPIGMVTKRGVVFHHALVHHETYSVNKVSKNVVVLKAYAGMDDTLLAAIENLPVDGIVIEALGQGNLPPRTLPSLERLINKGIPVVLVSRCFNGIVQDVYSYEGGGKQLKDMGIVFTYGLNAQKARIKLLVALENTTSHEAIQNMFMHD

SEQ ID NO: 157898 - DNA, 1137 bp, Helicobacter hepaticus ATCC 51449; identical to SEQ ID NO: 41557
  CDS (1)..(1137): transl_table=11

SEQ ID NO: 157899 - protein, 378 aa, Helicobacter hepaticus ATCC 51449; identical to SEQ ID NO: 41558

SEQ ID NO: 157900 - DNA, 1050 bp, Haemophilus ducreyi 35000HP; identical to SEQ ID NO: 41559
  CDS (1)..(1050): transl_table=11

SEQ ID NO: 157901 - protein, 349 aa, Haemophilus ducreyi 35000HP; identical to SEQ ID NO: 41560

SEQ ID NO: 157902 - DNA, 1002 bp, Bordetella parapertussis 12822
  CDS (1)..(1002): transl_table=11
atgcctgaggcccggctgccgcggattgctgtcctggcgaccggcggcaccattgccggcgcgcaaaccgacgcggccagcggcgcttaccgcgccggctcgtacggcgtcgggcagttgctggcggccgtgcctcaactggccggcctggcgcgcatcggcgccgagcagatcgccaacgtcggcagccagaacatgagccatgccgtctggcggcagctcgcgctgcgcgccgccgcgctgtgcgacgatccggcgaccgacggcatcgtcattacccatggcaccgatacgctggaagagaccgcttatttcctcagcctggtattgcctgtggataaaccggtggtgctgctgggcgccatgcgcccggccaccgcgttgagcgccgacgggccggtcaatctatacaacgcggtggcgttggcctgccatccggccgcacgcggccgcgggccgctggtcgtgatgaacgaggatatccatctggcccgtcatgtgcagaaaacggccgcctctggcatcgccgcgttcgcttcgcccaatgcaggccgggccggcgtcatgcagggcggccggccggtgtttcacgcccgcgccgagcgccaggccgccgacgcgctgctcaggccggacgaactgccgcagcaggcctggccgcgggtcgacatcgtgcatgcctgtgtcgatctcgacggcgagctcatcgatttcatggccgggcgagcccagggcatcgtgctggccggcgtgggcgacggcaacgccaccgacgcggccctgcaggccctgcagcgggcctgcgcgcggggcgttgcggtggtgcgggcgtcgcgcaccggctcgggcagggtggggcgcaatatcgagatcgacgacgacgcctgcggcttcattgccgccggcgacctcagcccccagaaggcccgcgtgctgcttaccctgggcctgtgccagacccgcgataccgcgcgcctgcaggcgttggtcgacagccgctga

SEQ ID NO: 157903 - protein, 333 aa, Bordetella parapertussis 12822
MPEARLPRIAVLATGGTIAGAQTDAASGAYRAGSYGVGQLLAAVPQLAGLARIGAEQIANVGSQNMSHAVWRQLALRAAALCDDPATDGIVITHGTDTLEETAYFLSLVLPVDKPVVLLGAMRPATALSADGPVNLYNAVALACHPAARGRGPLVVMNEDIHLARHVQKTAASGIAAFASPNAGRAGVMQGGRPVFHARAERQAADALLRPDELPQQAWPRVDIVHACVDLDGELIDFMAGRAQGIVLAGVGDGNATDAALQALQRACARGVAVVRASRTGSGRVGRNIEIDDDACGFIAAGDLSPQKARVLLTLGLCQTRDTARLQALVDSR

SEQ ID NO: 157904 - DNA, 1002 bp, Bordetella bronchiseptica RB50; identical to SEQ ID NO: 41561
  CDS (1)..(1002): transl_table=11

SEQ ID NO: 157905 - protein, 333 aa, Bordetella bronchiseptica RB50; identical to SEQ ID NO: 41562

SEQ ID NO: 157906 - DNA, 1032 bp, Synechococcus sp. WH 8102; identical to SEQ ID NO: 41563
  CDS (1)..(1032): transl_table=11

SEQ ID NO: 157907 - protein, 343 aa, Synechococcus sp. WH 8102; identical to SEQ ID NO: 41564

SEQ ID NO: 157908 - DNA, 1047 bp, Wolinella succinogenes DSM 1740; identical to SEQ ID NO: 41565
  CDS (1)..(1047): transl_table=11

SEQ ID NO: 157909 - protein, 348 aa, Wolinella succinogenes DSM 1740; identical to SEQ ID NO: 41566

SEQ ID NO: 157910 - DNA, 1044 bp, Photorhabdus luminescens subsp. laumondii TTO1; identical to SEQ ID NO: 41567
  CDS (1)..(1044): transl_table=11

SEQ ID NO: 157911 - protein, 347 aa, Photorhabdus luminescens subsp. laumondii TTO1; identical to SEQ ID NO: 41568

SEQ ID NO: 157912 - DNA, 1029 bp, Corynebacterium diphtheriae NCTC 13129
  CDS (1)..(1029): transl_table=11
atgatttcacgcagaagtttcctcggcgcatgcgctcttgcttccgtagcaggtgcggtgcagacatgcagcaacaaagccggcagcgcaggtgtgcgtaacgacgcctccggtcacctcatcgtgctcggcaccggtggcacgatcgcatgcaccaacgtcgatggggcactggtgcccaccgtctccggagaagaactcgtcgcaggagtatacgacaccttcgacaaagacaaactcagcatcgatgtccgccaagtatctcagctcgactcctcggcaatgacactcaaagacaccgacatgattatcaccgaggtactcaaagccgtaaaagaagacggcgtgaccggtgtgatcgtcacccacggcaccgactccatggaagaatcagccatcgccgtagacaccttcctcgactccgacgtacccgtcgtattcaccggctccatgctgcctttcgacgaccccaaaaccgatggcccagccaacctcttgctcgcagttcgcaccgctaccgcccccgaaaaccgcggcaaaggcgcgtttattgccttcggtgaaaagacacttcgtgcccgtggcgcctacaaatccaacgccaatagcgtggacggatttgatagcaacgccgacaacgagctcacccgtcctgcagcattggcctacaaacccctagaacaccagcgcgttgacatcatcgccgcctacccaggcgcaccccgcgcgcttgtcgacgcctccctcgccagcggcgccaaagccctggtcatcgaaggcatgggtgccggcaacgtaggcggtgacatcgccctcgctatctccgacgccttggacaagaaaatccccgtagtgatgtccacgcgtgtcgacgccggccgcgtcgaaggcacctacggcggtgccggcggtggcgcaacacttgccgccaaaggcgtgattggtgcagacatcctgcgcgccgggcagtcacgaatcctactggcctgcgcattagcaacgaaaactgacccgaagacgctgttttag

SEQ ID NO: 157913 - protein, 342 aa, Corynebacterium diphtheriae NCTC 13129
MISRRSFLGACALASVAGAVQTCSNKAGSAGVRNDASGHLIVLGTGGTIACTNVDGALVPTVSGEELVAGVYDTFDKDKLSIDVRQVSQLDSSAMTLKDTDMIITEVLKAVKEDGVTGVIVTHGTDSMEESAIAVDTFLDSDVPVVFTGSMLPFDDPKTDGPANLLLAVRTATAPENRGKGAFIAFGEKTLRARGAYKSNANSVDGFDSNADNELTRPAALAYKPLEHQRVDIIAAYPGAPRALVDASLASGAKALVIEGMGAGNVGGDIALAISDALDKKIPVVMSTRVDAGRVEGTYGGAGGGATLAAKGVIGADILRAGQSRILLACALATKTDPKTLF

SEQ ID NO: 157914 - DNA, 1506 bp, Gibberella zeae PH-1
  CDS (1)..(1506)
atggctcccaaaacaaccatgtcagacccggacccagagaacatgtgtccagggtccgggccgatgcaccgtgctcagcagcaaagcaagagaccatactcccagtacaagaacggggagcatcgcatctccattatatcagtctacatcatgatgcccagcgtcagaagatttcacggccagactatggtcgccgccgctccttctatttgctcagggcctgcagcatcgtccaccatcaagatggcttcatcgtcagcttcgtggacgacttatctgtggcggcttatcctagctgtgctggctccttcaacggccctgctgccttttggtgcgtgggttgtttcggtctggggatctcctgtcctcgacctacacgtccaacctcacttctcggttcaacaaaaagcgccaatacagacgggcatccctttcgaaatttcgaccacctcaggattcaactgcttcaatcccaatcttcccaacgtcactatttatgccaccggaggtactattgctggctccgcaagctcggctgatcagaccacgggataccggtcagctgcgttaggagttgattctctcattgatgcagtaccccaattgtgcaatgtagccaatgtgagaggtgtccagtttgccaacacggacagcatagacatgagctcggccatgttgaggactttggcgaagcagatccagaatgatctggacagtccgtttactcaaggcgcagttgtgacgcacggaactgatactctggatgaatctgccttctttctggatcttactatccagagcgacaagcccgtggtcgtgacaggctcaatgcgcccggcaactgctatcagcgcagatggaccaatgaatcttttgtcatcggtgacattggcagcagcagcgagtgctcgaggcagaggagtgatgattgccatgaatgatcgcattggatctgctcgttttacgaccaaagtcaacgccaaccatttggacgccttccaagcccctgacagtggcatgctgggaacattcgtcaacgttcagccagtgtttttctatccgccatcacgacctcttggccaccgtcattttgatctgcggcccatcaccaacaacggccgccggttcggacgctctacagcccccggagcaggatcatcagcactaccccaggtggacgtgctctacgcttaccaggagctcagcgtgggcatgttccaggcggccatcgaccttggagcgcagggcatcgttctagcgggaatgggcgctggattctggacgtccaaaggtaccgaggagattcggcgtatcgtccacgagaccgatattcccgtgatagtgagccgaagaccggaaggcggcttcgtcggaccatgtgaggcaggaatcggcgcgggctttttgaatccgcaaaaggcgaggatccagctccaactggccctggagaccaagatggacaatgatgccatcaaagccctgtttgagcattcgggagtgcactaa

SEQ ID NO: 157915 - protein, 501 aa, Gibberella zeae PH-1
MAPKTTMSDPDPENMCPGSGPMHRAQQQSKRPYSQYKNGEHRISIISVYIMMPSVRRFHGQTMVAAAPSICSGPAASSTIKMASSSASWTTYLWRLILAVLAPSTALLPFGAWVVSVWGSPVLDLHVQPHFSVQQKAPIQTGIPFEISTTSGFNCFNPNLPNVTIYATGGTIAGSASSADQTTGYRSAALGVDSLIDAVPQLCNVANVRGVQFANTDSIDMSSAMLRTLAKQIQNDLDSPFTQGAVVTHGTDTLDESAFFLDLTIQSDKPVVVTGSMRPATAISADGPMNLLSSVTLAAAASARGRGVMIAMNDRIGSARFTTKVNANHLDAFQAPDSGMLGTFVNVQPVFFYPPSRPLGHRHFDLRPITNNGRRFGRSTAPGAGSSALPQVDVLYAYQELSVGMFQAAIDLGAQGIVLAGMGAGFWTSKGTEEIRRIVHETDIPVIVSRRPEGGFVGPCEAGIGAGFLNPQKARIQLQLALETKMDNDAIKALFEHSGVH

SEQ ID NO: 157916 - DNA, 1059 bp, Gibberella zeae PH-1; identical to SEQ ID NO: 41569
  CDS (1)..(1059)

SEQ ID NO: 157917 - protein, 352 aa, Gibberella zeae PH-1; identical to SEQ ID NO: 41570

SEQ ID NO: 157918 - DNA, 1116 bp, Gibberella zeae PH-1; identical to SEQ ID NO: 41571
  CDS (1)..(1116)

SEQ ID NO: 157919 - protein, 371 aa, Gibberella zeae PH-1; identical to SEQ ID NO: 41572

SEQ ID NO: 157920 - DNA, 1137 bp, Candida glabrata CBS 138; identical to SEQ ID NO: 41573
  CDS (1)..(1137)

SEQ ID NO: 157921 - protein, 378 aa, Candida glabrata CBS 138; identical to SEQ ID NO: 41574

SEQ ID NO: 157922 - DNA, 1194 bp, Kluyveromyces lactis NRRL Y-1140; identical to SEQ ID NO: 41575
  CDS (1)..(1194)

SEQ ID NO: 157923 - protein, 397 aa, Kluyveromyces lactis NRRL Y-1140; identical to SEQ ID NO: 41576

SEQ ID NO: 157924 - DNA, 996 bp, Debaryomyces hansenii CBS767; identical to SEQ ID NO: 41577
  CDS (1)..(996)

SEQ ID NO: 157925 - protein, 331 aa, Debaryomyces hansenii CBS767; identical to SEQ ID NO: 41578

SEQ ID NO: 157926 - DNA, 1191 bp, Debaryomyces hansenii CBS767; identical to SEQ ID NO: 41579
  CDS (1)..(1191)

SEQ ID NO: 157927 - protein, 396 aa, Debaryomyces hansenii CBS767; identical to SEQ ID NO: 41580

SEQ ID NO: 157928 - DNA, 1137 bp, Aspergillus nidulans FGSC A4; identical to SEQ ID NO: 41581
  CDS (1)..(1137)

SEQ ID NO: 157929 - protein, 378 aa, Aspergillus nidulans FGSC A4; identical to SEQ ID NO: 41582

SEQ ID NO: 157930 - DNA, 1455 bp, Candida albicans SC5314
  CDS (1)..(1455): transl_table=12
atgacaccaccaaaaagaagagaatcatcttcctcaattacaaatattcttacattaaataatcttgaacttggagcaacagcaggagaagtaagaggtgctggagcaatctcggaagaaaatggccttgttcatcaccaacatcatctcgaagattcagaacattatcatactactcaagtagaaatagaaagtcatttttccactgatgatgaaattaatcatcctggtaataatttcaatgatgatcaaattagtcatttaccaacaattaaaataaaatatcatcgatcaaattcagttcattctatttcatcagccaattcatttgatggtgctaacaacattagtggggatatttcgttgttaccgacaatcaaagttttaggtactggtggaacaattgcgtccaaaggagtatcatcacatcaaactgcaggatatgaagttgatttaactattgaagatttagtttctactatccctgatttatcacaaacttgtcaattagaatatgaacaagtattaaatattgattctaaagaaatggataattcctcattacttaaactttatcataaaattcaacttgatttaccacattatgatgggattgtcattactcatggtacagataccatggaagaaacggcattttttttacaatcaaccattaatacttttaaaccaattgtattatgtggatctatgagaccaagtacagcaatatcttctgatggacccatgaatttatatcaagcaatagccattgcttcgaatcgagaaagtcgtggtcgtggagttttaattgctttgaatgatagaattggttctggattttatatcaccaaatcaaacgctaattctttagatactttcaaatctattggtcaaggttatgtgggaaattttgttaataatgaaattagatattttttccctccagcaaaacctttaggtttaaccatgtttcatataaatgatttattttcatcatcatcttcttcttctgctattggcggtaacgacattataccttgtttacctgaagtaacaataatttatgctcatcaaggattaaataatgaaatatttaaatttgtcattaatgatctaaaatccaaggggattattttagctactatgggtgctggtagtatgtcagataaaactaatcaatatttatctgatttgttaattaataatcctaattatccaattgtttatagtaaacgatcaatggatgggatggttccaattggttcattacctaaagtactagcagtaataaaagacgccgctgacaatggtaaaccggcaaccaaaaaagttccatttgttaatgctatagctggtggatatttaaacccacaaaaagcaagaatattattacaattatgtttgaatgaaggtatggatttatcaaagattaaaaatgtattcaaaactgtataa

SEQ ID NO: 157931 - protein, 484 aa, Candida albicans SC5314
MTPPKRRESSSSITNILTLNNLELGATAGEVRGAGAISEENGLVHHQHHLEDSEHYHTTQVEIESHFSTDDEINHPGNNFNDDQISHLPTIKIKYHRSNSVHSISSANSFDGANNISGDISLLPTIKVLGTGGTIASKGVSSHQTAGYEVDLTIEDLVSTIPDLSQTCQLEYEQVLNIDSKEMDNSSLLKLYHKIQLDLPHYDGIVITHGTDTMEETAFFLQSTINTFKPIVLCGSMRPSTAISSDGPMNLYQAIAIASNRESRGRGVLIALNDRIGSGFYITKSNANSLDTFKSIGQGYVGNFVNNEIRYFFPPAKPLGLTMFHINDLFSSSSSSSAIGGNDIIPCLPEVTIIYAHQGLNNEIFKFVINDLKSKGIILATMGAGSMSDKTNQYLSDLLINNPNYPIVYSKRSMDGMVPIGSLPKVLAVIKDAADNGKPATKKVPFVNAIAGGYLNPQKARILLQLCLNEGMDLSKIKNVFKTV

SEQ ID NO: 157932 - DNA, 1068 bp, Acinetobacter sp. ADP1; identical to SEQ ID NO: 41595
  CDS (1)..(1068): transl_table=11

SEQ ID NO: 157933 - protein, 355 aa, Acinetobacter sp. ADP1; identical to SEQ ID NO: 41596

SEQ ID NO: 157934 - DNA, 1041 bp, Erwinia carotovora subsp. atroseptica SCRI1043; identical to SEQ ID NO: 41597
  CDS (1)..(1041): transl_table=11

SEQ ID NO: 157935 - protein, 346 aa, Erwinia carotovora subsp. atroseptica SCRI1043; identical to SEQ ID NO: 41598

SEQ ID NO: 157936 - DNA, 1050 bp, Erwinia carotovora subsp. atroseptica SCRI1043; identical to SEQ ID NO: 41599
  CDS (1)..(1050): transl_table=11

SEQ ID NO: 157937 - protein, 349 aa, Erwinia carotovora subsp. atroseptica SCRI1043; identical to SEQ ID NO: 41600

SEQ ID NO: 157938 - DNA, 1038 bp, Yersinia pseudotuberculosis IP 32953; identical to SEQ ID NO: 41603
  CDS (1)..(1038): transl_table=11

SEQ ID NO: 157939 - protein, 345 aa, Yersinia pseudotuberculosis IP 32953; identical to SEQ ID NO: 41604

SEQ ID NO: 157940 - DNA, 969 bp, Bacillus licheniformis ATCC 14580
  CDS (1)..(969): transl_table=11
atgaataaaaaagtagctctcattacaacgggaggaacgatcgccagccggaaaaccgaaagcggccggcttgcggcaggggcgatcagcggccctgaattagccgaaatgtgcagcctgccggaagatgtacagatcgatgtctacccggcgtttcagcttccaagtatgcatataacatttcagcatttattagagctcaagcaaaccatcgaacgcgtgtttcaggacggcggctatgacggcgcggttgtaacgcatggtacggacacgcttgaagaaaccgcctattttttggatttaacaatagaggatgagaggccggtcgttgtcacaggttcacagcgagcaccggaacagcaaggcacagatgcatatacaaatatcaggcatgccgtatatacagcttgcagtccggatataaaaggagccggcacggttgttgtttttaacgaaaggatctttaacgcgcgctacgttaaaaaagtgcacgcttcgaatctgcagggttttgacgtattcggtttcggctacttagggatcattgataacgacaaagtatacgtttatcaaaagccgttaaagcgggatgttcaccagctgcaaaggccgcttcctgcagtggacatcgtcaaatgctatcttgatggagacggcaagtttatcagagccgccgtccgcgagggtgtcgaagggatcgtccttgagggagtcggaagggggcaggtgccgccgaatatgatggctgatatcgaacaagctttaaatcagggcgtttatatcgtcatcacgacgagcgcagaggaaggcgaagtttatacgacctatgactatgcaggcagcagctatgacctcgcgaaaaaaggggtcattttaggcaaggattatgacagcaaaaaagcgagaatgaaactcgccgtccttcttgcaagctataaagaaggcataaaagacaaattctgctattag

SEQ ID NO: 157941 - protein, 322 aa, Bacillus licheniformis ATCC 14580
MNKKVALITTGGTIASRKTESGRLAAGAISGPELAEMCSLPEDVQIDVYPAFQLPSMHITFQHLLELKQTIERVFQDGGYDGAVVTHGTDTLEETAYFLDLTIEDERPVVVTGSQRAPEQQGTDAYTNIRHAVYTACSPDIKGAGTVVVFNERIFNARYVKKVHASNLQGFDVFGFGYLGIIDNDKVYVYQKPLKRDVHQLQRPLPAVDIVKCYLDGDGKFIRAAVREGVEGIVLEGVGRGQVPPNMMADIEQALNQGVYIVITTSAEEGEVYTTYDYAGSSYDLAKKGVILGKDYDSKKARMKLAVLLASYKEGIKDKFCY

SEQ ID NO: 157942 - DNA, 1068 bp, Mannheimia succiniciproducens MBEL55E; identical to SEQ ID NO: 41607
  CDS (1)..(1068): transl_table=11

SEQ ID NO: 157943 - protein, 355 aa, Mannheimia succiniciproducens MBEL55E; identical to SEQ ID NO: 41608

SEQ ID NO: 157944 - DNA, 1044 bp, Burkholderia pseudomallei K96243
  CDS (1)..(1044): transl_table=11
atgaacgcaccgacatcctcccattcccctcacgtttcgaacccggcgccgcgcgcgctgccgcgcatcgccgtcctcgcgacgggcggcacgatcgcgggcgcggcgcccgacgccgcgcagacggccggctaccaggcgggcgcgctcggcgtcgacaggctgctcgccgccgtgcccgcgctcgcgcagatcgcgacgatcgaggccgagcaggtcgcgagcatcgacagcaaggacttgtcgcccgcgctgtggacgacgctcgccgagcggatcgacgcgcttgcggcgaacgacgcgatcgacggcatcgtgatcacgcacggcaccgacacgctcgaagagaccgcgtacctgctgcatctgaccgtgaagaccgcgaagcctgtcgtgatgacggcggcgatgcgcccggcgaccgcgctgtcgtccgacggcccgctcaacctgctgaacgcggtcgccgtcgcgggcagcgcggcggcgcgcgggcagggcgtgctcgtcgcgttcaacaaccggatccatagcgcgcgcgacgtcgtgaagacgagcacctatgcggtcgatgcatttcactcgcccgaactgggcgcgctcggctgggtgcaggacggccgcatcgagttcgcgcgccgcgcgacgcgcccgcatacgctcgactcgcgcttcgcgatcggcgccgcctggccgcaggtcgaggtcgtcgcgagctatgcgggcgcatcgcgcgtgatcgtcgatgcatgcgtcgcggcgggcgcgcgcgggctcgtcgtcgcgggcacgggcaacggctcgatccatgcggcgctgcaggcggcgctcgccgatgcggcggcgaagggcgtcgcgatcgtgcgcgcgtcgcgcgtcggctcgggacacgtgatgcgcaacggggcggcgaacgacgatgcgctcggcttcgtgagcgcgggttcgctcaatccgtacaaggcgcgcgtgctgctgatgctcgcgctggcggccggcgtcgcagacgtgcgcgaattgcagcaggtgttcgatacgtattga

SEQ ID NO: 157945 - protein, 347 aa, Burkholderia pseudomallei K96243
MNAPTSSHSPHVSNPAPRALPRIAVLATGGTIAGAAPDAAQTAGYQAGALGVDRLLAAVPALAQIATIEAEQVASIDSKDLSPALWTTLAERIDALAANDAIDGIVITHGTDTLEETAYLLHLTVKTAKPVVMTAAMRPATALSSDGPLNLLNAVAVAGSAAARGQGVLVAFNNRIHSARDVVKTSTYAVDAFHSPELGALGWVQDGRIEFARRATRPHTLDSRFAIGAAWPQVEVVASYAGASRVIVDACVAAGARGLVVAGTGNGSIHAALQAALADAAAKGVAIVRASRVGSGHVMRNGAANDDALGFVSAGSLNPYKARVLLMLALAAGVADVRELQQVFDTY

SEQ ID NO: 157946 - DNA, 1056 bp, Burkholderia pseudomallei K96243; identical to SEQ ID NO: 41609
  CDS (1)..(1056): transl_table=11

SEQ ID NO: 157947 - protein, 351 aa, Burkholderia pseudomallei K96243; identical to SEQ ID NO: 41610

SEQ ID NO: 157948 - DNA, 1086 bp, Azoarcus sp. EbN1; identical to SEQ ID NO: 41611
  CDS (1)..(1086): transl_table=11

SEQ ID NO: 157949 - protein, 361 aa, Azoarcus sp. EbN1; identical to SEQ ID NO: 41612

SEQ ID NO: 157950 - DNA, 996 bp, Campylobacter jejuni RM1221; identical to SEQ ID NO: 41613
  CDS (1)..(996): transl_table=11

SEQ ID NO: 157951 - protein, 331 aa, Campylobacter jejuni RM1221; identical to SEQ ID NO: 41614

SEQ ID NO: 157952 - DNA, 1059 bp, Bacteroides fragilis NCTC 9343
  CDS (1)..(1059): transl_table=11
atgaaagaattaaaaagactaagctttgtagtggtcacactactactttccacgatgatggctttcgcgcaaaagcctaatattcacatccttgctacgggtggcacaattgccggtacaggcggttctgccacttccaccaactatacggccggccaggtagcaatcagtacgctgctcgatgcagtacccgaactcaaggatattgccaacgtgaccggtgagcaaattgtacgtatcgcatcgcaggacatgagcgatgaagtgtggctgatactcgccaagaagatcaaccaactcctgaaacgcccggacatcgacggtatcgttatcactcacggaacagatacgatggaagagactgcctatttcctgaacctgaccgtaaaaagtaacaaacccgtggtacttgtaggagccatgcgcccttctaccgcgctgagtgccgatggcccgctgaacctctacaatgccgtagtcactgccggagccaaagaatctatcggcaaaggtgtgctgatagccatgaacggactgattctcggagctgaaagcgcaataaagatgaatacgatcgacgtacaaactttccaggcacccaactccggtgcattgggctatatctttaacggaaaagtattctataaccaggctccgctcaagaaacatacgacccaatctgttttcgacgtaaccaacctgaactctcttcccaaagtaggcattgtctacagctactcgaacatcgaccccgatatggtgaccccactgttacatcatgactacaaaggtatcatccatgcgggagtaggaaacggcaacttccacaaaaacattttaccggtactgctggaagcacgcaagaaaggaatcctcgtggttcgctcctcccgcgtacctaccggtcctaccacaatggatgccgaagtagacgatactcaatatcagtttattgcttctcaggaactgaatccgcagaagtcacgtgtattgctgattctcggactgaccaaaaccaatgactggaaacagattcagcaatattttaatgagtattaa

SEQ ID NO: 157953 - protein, 352 aa, Bacteroides fragilis NCTC 9343
MKELKRLSFVVVTLLLSTMMAFAQKPNIHILATGGTIAGTGGSATSTNYTAGQVAISTLLDAVPELKDIANVTGEQIVRIASQDMSDEVWLILAKKINQLLKRPDIDGIVITHGTDTMEETAYFLNLTVKSNKPVVLVGAMRPSTALSADGPLNLYNAVVTAGAKESIGKGVLIAMNGLILGAESAIKMNTIDVQTFQAPNSGALGYIFNGKVFYNQAPLKKHTTQSVFDVTNLNSLPKVGIVYSYSNIDPDMVTPLLHHDYKGIIHAGVGNGNFHKNILPVLLEARKKGILVVRSSRVPTGPTTMDAEVDDTQYQFIASQELNPQKSRVLLILGLTKTNDWKQIQQYFNEY

SEQ ID NO: 157954 - DNA, 1089 bp, Pseudomonas fluorescens Pf-5
  CDS (1)..(1089): transl_table=11
atgaaatctgccttcaaatccttcgccccgggcgctttggccctcctcctgcttctacctgcagccctgcaagccaaagaagctgaaacccaacagaaactgtccaacgtcgtggttctcgccaccggcggcaccatcgccggcgccggcgccagcgcggccaacagcgccacctaccaggcggccaaggtcggcatcgaacaactgatcgccggcattcccgagttgagccaactggccaacgtgcgtggcgagcaagtcatgcagatcgcctcggaaagcatcaccaacgaaaacctgctgcaactgggccgccgcgttgccgaactggccgacagcaaggacgtcgatggcatcgtcatcacccacggtaccgataccctggaagaaaccgcctacttcctcaacctggtggaaaagaccgacaagccaatcgttgtagtcggctccatgcgcccgggtaccgcaatgtcggctgacggcatgctcaacctgtacaacgctgtggctgtggccggcagcaagaacgcccgcggcaaaggcgtactggtgaccatgaacgatgaaatccagtccggccgcgatgtcagcaagatgatcaacatcaagaccgaagccttcaagagcccatggggcccgctgggcatggtggtggaaggcaaatcctactggttccgcctgccagccaagcgccacaccatggattcggaattcgacatcaagaacatcaagagcctgcctgacgtagaaatcgcctacggctacggcaacgtcagcgacaccgcctacaaggccctggcccaaggtggcgccaaagccatcatccacgccggtaccggcaacggctcggtgtcttcccgtgtggtccctgccctgcaggaactgcgcaagaatggcgtacagatcattcgttcttcccacgtcaatgccggcggtttcgtactgcgcaacgccgaacagcctgacgacaagtacgactgggtcgtggctcatgacctgaacccgcagaaagcccgcatcctggccatggtcgccctgaccaagacccaggacagcaaggaactgcaacgcatgttctgggaatactga

SEQ ID NO: 157955 - protein, 362 aa, Pseudomonas fluorescens Pf-5
MKSAFKSFAPGALALLLLLPAALQAKEAETQQKLSNVVVLATGGTIAGAGASAANSATYQAAKVGIEQLIAGIPELSQLANVRGEQVMQIASESITNENLLQLGRRVAELADSKDVDGIVITHGTDTLEETAYFLNLVEKTDKPIVVVGSMRPGTAMSADGMLNLYNAVAVAGSKNARGKGVLVTMNDEIQSGRDVSKMINIKTEAFKSPWGPLGMVVEGKSYWFRLPAKRHTMDSEFDIKNIKSLPDVEIAYGYGNVSDTAYKALAQGGAKAIIHAGTGNGSVSSRVVPALQELRKNGVQIIRSSHVNAGGFVLRNAEQPDDKYDWVVAHDLNPQKARILAMVALTKTQDSKELQRMFWEY

SEQ ID NO: 157956 - DNA, 1125 bp, Ralstonia eutropha JMP134; identical to SEQ ID NO: 41617
  CDS (1)..(1125): transl_table=11

SEQ ID NO: 157957 - protein, 374 aa, Ralstonia eutropha JMP134; identical to SEQ ID NO: 41618

SEQ ID NO: 157958 - DNA, 1137 bp, Ralstonia eutropha JMP134; identical to SEQ ID NO: 41619
  CDS (1)..(1137): transl_table=11

SEQ ID NO: 157959 - protein, 378 aa, Ralstonia eutropha JMP134; identical to SEQ ID NO: 41620

SEQ ID NO: 157960 - DNA, 1089 bp, Pseudomonas fluorescens PfO-1; identical to SEQ ID NO: 41621
  CDS (1)..(1089): transl_table=11

SEQ ID NO: 157961 - protein, 362 aa, Pseudomonas fluorescens PfO-1; identical to SEQ ID NO: 41622

SEQ ID NO: 157962 - DNA, 1023 bp, Burkholderia sp. 383; identical to SEQ ID NO: 41623
  CDS (1)..(1023): transl_table=11

SEQ ID NO: 157963 - protein, 340 aa, Burkholderia sp. 383; identical to SEQ ID NO: 41624

SEQ ID NO: 157964 - DNA, 984 bp, Synechococcus sp. CC9605; identical to SEQ ID NO: 41625
  CDS (1)..(984): transl_table=11

SEQ ID NO: 157965 - protein, 327 aa, Synechococcus sp. CC9605; identical to SEQ ID NO: 41626

SEQ ID NO: 157966 - DNA, 1044 bp, Burkholderia thailandensis E264; identical to SEQ ID NO: 41627
  CDS (1)..(1044): transl_table=11

SEQ ID NO: 157967 - protein, 347 aa, Burkholderia thailandensis E264; identical to SEQ ID NO: 41628

SEQ ID NO: 157968 - DNA, 1041 bp, Burkholderia xenovorans LB400; identical to SEQ ID NO: 41631
  CDS (1)..(1041): transl_table=11

SEQ ID NO: 157969 - protein, 346 aa, Burkholderia xenovorans LB400; identical to SEQ ID NO: 41632

SEQ ID NO: 157970 - DNA, 1128 bp, Ralstonia metallidurans CH34; identical to SEQ ID NO: 41633
  CDS (1)..(1128): transl_table=11

SEQ ID NO: 157971 - protein, 375 aa, Ralstonia metallidurans CH34; identical to SEQ ID NO: 41634

SEQ ID NO: 157972 - DNA, 1002 bp, Ralstonia metallidurans CH34; identical to SEQ ID NO: 41635
  CDS (1)..(1002): transl_table=11

SEQ ID NO: 157973 - protein, 333 aa, Ralstonia metallidurans CH34; identical to SEQ ID NO: 41636

SEQ ID NO: 157974 - DNA, 1020 bp, Synechococcus sp. CC9311; identical to SEQ ID NO: 41643
  CDS (1)..(1020): transl_table=11

SEQ ID NO: 157975 - protein, 339 aa, Synechococcus sp. CC9311; identical to SEQ ID NO: 41644

SEQ ID NO: 157976 - DNA, 1089 bp, Pseudomonas aeruginosa UCBPP-PA14; identical to SEQ ID NO: 41647
  CDS (1)..(1089): transl_table=11

SEQ ID NO: 157977 - protein, 362 aa, Pseudomonas aeruginosa UCBPP-PA14; identical to SEQ ID NO: 41648

SEQ ID NO: 157978 - DNA, 975 bp, Azoarcus sp. BH72; identical to SEQ ID NO: 41657
  CDS (1)..(975): transl_table=11

SEQ ID NO: 157979 - protein, 324 aa, Azoarcus sp. BH72; identical to SEQ ID NO: 41658

SEQ ID NO: 157980 - DNA, 1098 bp, Azoarcus sp. BH72; identical to SEQ ID NO: 41659
  CDS (1)..(1098): transl_table=11

SEQ ID NO: 157981 - protein, 365 aa, Azoarcus sp. BH72; identical to SEQ ID NO: 41660

SEQ ID NO: 157982 - DNA, 1101 bp, Acidovorax sp. JS42; identical to SEQ ID NO: 41665
  CDS (1)..(1101): transl_table=11

SEQ ID NO: 157983 - protein, 366 aa, Acidovorax sp. JS42; identical to SEQ ID NO: 41666

SEQ ID NO: 157984 - DNA, 1011 bp, Actinobacillus pleuropneumoniae serovar 1 str. 4074; identical to SEQ ID NO: 41667
  CDS (1)..(1011): transl_table=11

SEQ ID NO: 157985 - protein, 336 aa, Actinobacillus pleuropneumoniae serovar 1 str. 4074; identical to SEQ ID NO: 41668

SEQ ID NO: 157986 - DNA, 981 bp, Erythrobacter sp. NAP1; identical to SEQ ID NO: 41673
  CDS (1)..(981): transl_table=11

SEQ ID NO: 157987 - protein, 326 aa, Erythrobacter sp. NAP1; identical to SEQ ID NO: 41674

SEQ ID NO: 157988 - DNA, 996 bp, Synechococcus sp. WH 7805; identical to SEQ ID NO: 41677
  CDS (1)..(996): transl_table=11

SEQ ID NO: 157989 - protein, 331 aa, Synechococcus sp. WH 7805; identical to SEQ ID NO: 41678

SEQ ID NO: 157990 - DNA, 1068 bp, Photobacterium sp. SKA34; identical to SEQ ID NO: 41679
  CDS (1)..(1068): transl_table=11

SEQ ID NO: 157991 - protein, 355 aa, Photobacterium sp. SKA34; identical to SEQ ID NO: 41680

SEQ ID NO: 157992 - DNA, 1017 bp, Synechococcus sp. RS9916; identical to SEQ ID NO: 41683
  CDS (1)..(1017): transl_table=11

SEQ ID NO: 157993 - protein, 338 aa, Synechococcus sp. RS9916; identical to SEQ ID NO: 41684

SEQ ID NO: 157994 - DNA, 1065 bp, Vibrio sp. Ex25; identical to SEQ ID NO: 41685
  CDS (1)..(1065): transl_table=11

SEQ ID NO: 157995 - protein, 354 aa, Vibrio sp. Ex25; identical to SEQ ID NO: 41686

SEQ ID NO: 157996 - DNA, 1137 bp, Aspergillus niger
  CDS (1)..(1137)
atgcctctcaagccgattctcctgtctgccctggccagtctcgcctcggcctctccgctgctctactcgcggaccaccaatgaaaccttcgtcttcaccaatgccaatggcctcaacttcacccagatgaacaccaccctgccgaacgtgaccattttcgcaacgggtggtaccatcgcgggctccgattccagctcaaccgccacgaccggctacacctccggagcagtcggggtcctgtccctcatcgatgcggtgccatccatgctggatgtggccaatgttgccggcgtccaggtggccaacgtgggaagcgaggatatcacctctgacatcctgatttccatgtccaagaagctgaaccgcgttgtatgtgaggacccgaccatggccggtgctgtcatcacccacggcaccgacaccctcgaggagactgccttcttcctggacgccactgtcaactgtggcaagccaattgtcatcgtgggtgccatgcgcccatccacggccatctcagctgacgggcccttcaatctgctcgaagccgtgacggtggctgcctccacgtcggcgcgcgatcgcggtgccatggtggtcatgaacgatcgcattgcctcggcctactatgtgaccaagaccaatgccaacactatggacaccttcaaggccatggagatgggctaccttggcgagatgatctccaacacccctttcttcttctacccgcccgtcaagccaaccggtaaggtggcctttgacatcaccaacgtgactgagatcccccgtgtggacattctgttttcttatgaggacatgcacaacgacaccctctacaacgccatctccagtggtgcccagggaattgtgattgccggggctggtgctggaggcgtcacaacctccttcaatgaggctatcgaggatgtcatcaaccgtttggagatccctgtcgtgcagagtatgcgcacagtcaatggggaagtgccactgtcagacgtgagcagcgacaccgccacccacatcgccagtggatacctaaacccgcagaagtcccgcattctgttgggattgctgctatcccagggaaagaatatcaccgaaatcgctgacgtgtttgctctgggcacggatgcgtag

SEQ ID NO: 157997 - protein, 378 aa, Aspergillus niger
MPLKPILLSALASLASASPLLYSRTTNETFVFTNANGLNFTQMNTTLPNVTIFATGGTIAGSDSSSTATTGYTSGAVGVLSLIDAVPSMLDVANVAGVQVANVGSEDITSDILISMSKKLNRVVCEDPTMAGAVITHGTDTLEETAFFLDATVNCGKPIVIVGAMRPSTAISADGPFNLLEAVTVAASTSARDRGAMVVMNDRIASAYYVTKTNANTMDTFKAMEMGYLGEMISNTPFFFYPPVKPTGKVAFDITNVTEIPRVDILFSYEDMHNDTLYNAISSGAQGIVIAGAGAGGVTTSFNEAIEDVINRLEIPVVQSMRTVNGEVPLSDVSSDTATHIASGYLNPQKSRILLGLLLSQGKNITEIADVFALGTDA

SEQ ID NO: 157998 - DNA, 1071 bp, Herbaspirillum seropedicae; identical to SEQ ID NO: 41691
  CDS (1)..(1071): transl_table=11

SEQ ID NO: 157999 - protein, 356 aa, Herbaspirillum seropedicae; identical to SEQ ID NO: 41692

SEQ ID NO: 158000 - DNA, 1137 bp, Aspergillus oryzae; identical to SEQ ID NO: 41695
  CDS (1)..(1137)

SEQ ID NO: 158001 - protein, 378 aa, Aspergillus oryzae; identical to SEQ ID NO: 41696

SEQ ID NO: 158002 - DNA, 1047 bp, Erwinia chrysanthemi; identical to SEQ ID NO: 41697
  CDS (1)..(1047): transl_table=11

SEQ ID NO: 158003 - protein, 348 aa, Erwinia chrysanthemi; identical to SEQ ID NO: 41698

SEQ ID NO: 158004 - DNA, 1083 bp, Schizosaccharomyces pombe; identical to SEQ ID NO: 41699
  CDS (1)..(1083)

SEQ ID NO: 158005 - protein, 360 aa, Schizosaccharomyces pombe; identical to SEQ ID NO: 41700

SEQ ID NO: 158006 - DNA, 1452 bp, Saccharomyces cerevisiae; identical to SEQ ID NO: 41701
  CDS (189)..(1334)

SEQ ID NO: 158007 - protein, 381 aa, Saccharomyces cerevisiae; identical to SEQ ID NO: 41702

SEQ ID NO: 158008 - DNA, 1128 bp, Bacillus subtilis; identical to SEQ ID NO: 41703
  CDS (1)..(1128): transl_table=11

SEQ ID NO: 158009 - protein, 375 aa, Bacillus subtilis; identical to SEQ ID NO: 41704

SEQ ID NO: 158010 - DNA, 1530 bp, Escherichia coli
  CDS (385)..(1431): transl_table=11
aaatgggcgcgaaagcggtgctgaaaagcggcggtaacccattacagaatgtgctgggaagcctgggaagcctgggggggctgcaatcctcaatccaaaccgagtggaaaaagcaggaaaaagatttccagcagtttggcaaagatgtttgtagccgcgttgtgactctggaagatagccgcaaagccctggtcgggaatttaaaataatcctctattttaagacggcataatacttttttatgccgtttaattcttcgttttgttacctgcctctaactttgtagatctccaaaatatattcacgttgtaaattgtttaacgtcaaatttcccatacagagctaagggataatgcgtagcgttcacgtaactggaggaatgaaatggagtttttcaaaaagacggcacttgccgcactggttatgggttttagtggtgcagcattggcattacccaatatcaccattttagcaaccggcgggaccattgccggtggtggtgactccgcaaccaaatctaactacacagtgggtaaagttggcgtagaaaatctggttaatgcggtgccgcaactaaaagacattgcgaacgttaaaggcgagcaggtagtgaatatcggctcccaggacatgaacgataatgtctggctgacactggcgaaaaaaattaacaccgactgcgataagaccgacggcttcgtcattacccacggtaccgacacgatggaagaaactgcttacttcctcgacctgacggtgaaatgcgacaaaccggtggtgatggtcggcgcaatgcgtccgtccacgtctatgagcgcagacggtccattcaacctgtataacgcggtagtgaccgcagctgataaagcctccgccaaccgtggcgtgctggtagtgatgaatgacaccgtgcttgatggccgtgacgtcaccaaaaccaacaccaccgacgtagcgaccttcaagtctgttaactacggtcctctgggttacattcacaacggtaagattgactaccagcgtaccccggcacgtaagcataccagcgacacgccattcgatgtctctaagctgaatgaactgccgaaagtcggcattgtttataactacgctaacgcatccgatcttccggctaaagcactggtagatgcgggctatgatggcatcgttagcgctggtgtgggtaacggcaacctgtataaatctgtgttcgacacgctggcgaccgccgcgaaaaccggtactgcagtcgtgcgttcttcccgcgtaccgacgggcgctaccactcaggatgccgaagtggatgatgcgaaatacggcttcgtcgcctctggcacgctgaacccgcaaaaagcgcgcgttctgctgcaactggctctgacgcaaaccaaagatccgcagcagatccagcagatcttcaatcagtactaatcgcctcgccccggtatcgtgccggggctttttcacttcagactcacgtccattgccaattttaattaccctaatgataatcaccggaataaattattt

SEQ ID NO: 158011 - protein, 348 aa, Escherichia coli; identical to SEQ ID NO: 41500

SEQ ID NO: 158012 - DNA, 1071 bp, Schizosaccharomyces pombe; identical to SEQ ID NO: 41705
  CDS (1)..(1071)

SEQ ID NO: 158013 - protein, 356 aa, Schizosaccharomyces pombe; identical to SEQ ID NO: 41706

SEQ ID NO: 158014 - DNA, 1083 bp, Schizosaccharomyces pombe; identical to SEQ ID NO: 41709
  CDS (1)..(1083)

SEQ ID NO: 158015 - protein, 360 aa, Schizosaccharomyces pombe; identical to SEQ ID NO: 41710

SEQ ID NO: 158016 - DNA, 1071 bp, Schizosaccharomyces pombe; identical to SEQ ID NO: 41711
  CDS (1)..(1071)

SEQ ID NO: 158017 - protein, 356 aa, Schizosaccharomyces pombe; identical to SEQ ID NO: 41712

SEQ ID NO: 158018 - DNA, 969 bp, Deinococcus radiodurans
  CDS (1)..(969): transl_table=11
atgcctgcttctctgccgcgcctcgccctgattcacaccggcggcaccatcgccagccggcccagtcccgacggacgcgggctgacgccgcaaacgccccccgcgctgccggggctggaaggagtgcaggtcagcgaacaccagccgttcaacctgccgagtccgcacgtcacgcccgcgcacatgcagcagctcgcgcacctcatcgagcagctcgccgggggccacgacgcggtggtggtcacgcacggcaccgacacgctggaagaaacggcctttttcctgcacctgtgcctgcccgctgggctgccggtggtgctgaccggctccatgcgccacgccgaggaagtctcctgggacggccccggcaacctgctcgacgccgcgcaggtcgcgctgtgcccgcagacggcggggcgtgggccgctcgtcgtgtttggcggggacatcttcgacgcccgcaccgtgacgaaggtgcacaccagcgcggtggacgcgttcggcggctatcccggtcccatcgggcgcatcgaccgcaccgccgccgggccgcaggtccactattttgcccggcccgaaccgcgccccactttccgcccggtcacgctggagcggcgggtggagattctctatgcctatgccggctggcagggcgagggctacgccggggcgctggagcgggccgacggactggtgattgccgcgctcggcaccggcaacctgccgcccgaactgctgccactcattgccgcgaccgacaagccggtggtgctcgctacccgcacccacgccgggccgattttgccggtgtacggctacgcgggcggcggcgcgacgttggtggaagcgggcgcgattcccgccagttttctcaacgcgcacaaggcgcggctgctgctgctggtgctgcttaacctgggagcgtcgcgcgaagatatccggcgggtctttacgcagggcgtcttctga

SEQ ID NO: 158019 - protein, 322 aa, Deinococcus radiodurans
MPASLPRLALIHTGGTIASRPSPDGRGLTPQTPPALPGLEGVQVSEHQPFNLPSPHVTPAHMQQLAHLIEQLAGGHDAVVVTHGTDTLEETAFFLHLCLPAGLPVVLTGSMRHAEEVSWDGPGNLLDAAQVALCPQTAGRGPLVVFGGDIFDARTVTKVHTSAVDAFGGYPGPIGRIDRTAAGPQVHYFARPEPRPTFRPVTLERRVEILYAYAGWQGEGYAGALERADGLVIAALGTGNLPPELLPLIAATDKPVVLATRTHAGPILPVYGYAGGGATLVEAGAIPASFLNAHKARLLLLVLLNLGASREDIRRVFTQGVF

SEQ ID NO: 158020 - DNA, 1047 bp, Erwinia chrysanthemi; identical to SEQ ID NO: 41713
  CDS (1)..(1047): transl_table=11

SEQ ID NO: 158021 - protein, 348 aa, Erwinia chrysanthemi; identical to SEQ ID NO: 41714

SEQ ID NO: 158022 - DNA, 999 bp, Helicobacter pylori J99; identical to SEQ ID NO: 41715
  CDS (1)..(999): transl_table=11

SEQ ID NO: 158023 - protein, 332 aa, Helicobacter pylori J99; identical to SEQ ID NO: 41716

SEQ ID NO: 158024 - DNA, 1047 bp, Wolinella succinogenes; identical to SEQ ID NO: 41565
  CDS (55)..(1047): transl_table=11

SEQ ID NO: 158025 - protein, 330 aa, Wolinella succinogenes; identical to SEQ ID NO: 41720

SEQ ID NO: 158026 - DNA, 1089 bp, Pseudomonas putida; identical to SEQ ID NO: 41725
  CDS (1)..(1089): transl_table=11

SEQ ID NO: 158027 - protein, 362 aa, Pseudomonas putida; identical to SEQ ID NO: 41726

SEQ ID NO: 158028 - DNA, 27 bp, Artificial sequence
  primer
atgagatctttaaatacccttttactt

SEQ ID NO: 158029 - DNA, 24 bp, Artificial sequence
  primer
ttaaccaccgtagacgccagaaaa

SEQ ID NO: 158030 - protein, 353 aa, Artificial sequence
  consensus sequence
  Variant (7)..(16): Xaa in position 7 to 16 is any amino acid
  Variant (17)..(17): Xaa in position 17 is any or no amino acid
  Variant (19)..(23): Xaa in position 19 to 23 is any amino acid
  Variant (24)..(29): Xaa in position 24 to 29 is any or no amino acid
  Variant (31)..(34): Xaa in position 31 to 34 is any amino acid
  Variant (36)..(42): Xaa in position 36 to 42 is any amino acid
  Variant (43)..(47): Xaa in position 43 to 47 is any or no amino acid
  Variant (49)..(53): Xaa in position 49 to 53 is any amino acid
  Variant (54)..(57): Xaa in position 54 to 57 is any or no amino acid
  Variant (59)..(68): Xaa in position 59 to 68 is any amino acid
  Variant (70)..(81): Xaa in position 70 to 81 is any amino acid
  Variant (82)..(85): Xaa in position 82 to 85 is any or no amino acid
  Variant (87)..(87): Xaa in position 87 is any amino acid
  Variant (89)..(89): Xaa in position 89 is any amino acid
  Variant (96)..(96): Xaa in position 96 is any amino acid
  Variant (101)..(101): Xaa in position 101 is any amino acid
  Variant (104)..(111): Xaa in position 104 to 111 is any amino acid
  Variant (112)..(112): Xaa in position 112 is any or no amino acid
  Variant (114)..(114): Xaa in position 114 is any amino acid
  Variant (116)..(117): Xaa in position 116 to 117 is any amino acid
  Variant (119)..(119): Xaa in position 119 is any amino acid
  Variant (123)..(127): Xaa in position 123 to 127 is any amino acid
  Variant (131)..(132): Xaa in position 131 to 132 is any amino acid
  Variant (135)..(136): Xaa in position 135 to 136 is any amino acid
  Variant (138)..(140): Xaa in position 138 to 140 is any amino acid
  Variant (142)..(149): Xaa in position 142 to 149 is any amino acid
  Variant (151)..(155): Xaa in position 151 to 155 is any amino acid
  Variant (157)..(158): Xaa in position 157 to 158 is any amino acid
  Variant (160)..(166): Xaa in position 160 to 166 is any amino acid
  Variant (168)..(175): Xaa in position 168 to 175 is any amino acid
  Variant (176)..(176): Xaa in position 176 is any or no amino acid
  Variant (178)..(181): Xaa in position 178 to 181 is any amino acid
  Variant (182)..(182): Xaa in position 182 is any or no amino acid
  Variant (184)..(185): Xaa in position 184 to 185 is any amino acid
  Variant (187)..(198): Xaa in position 187 to 198 is any amino acid
  Variant (199)..(233): Xaa in position 199 to 233 is any or no amino acid
  Variant (235)..(235): Xaa in position 235 is any amino acid
  Variant (237)..(237): Xaa in position 237 is any amino acid
  Variant (239)..(258): Xaa in position 239 to 258 is any amino acid
  Variant (259)..(260): Xaa in position 259 to 260 is any or no amino acid
  Variant (262)..(264): Xaa in position 262 to 264 is any amino acid
  Variant (266)..(267): Xaa in position 266 to 267 is any amino acid
  Variant (269)..(269): Xaa in position 269 is any amino acid
  Variant (271)..(291): Xaa in position 271 to 291 is any amino acid
  Variant (292)..(296): Xaa in position 292 to 296 is any or no amino acid
  Variant (298)..(300): Xaa in position 298 to 300 is any amino acid
  Variant (302)..(314): Xaa in position 302 to 314 is any amino acid
  Variant (315)..(339): Xaa in position 315 to 339 is any or no amino acid
  Variant (343)..(343): Xaa in position 343 is any amino acid
  Variant (347)..(347): Xaa in position 347 is any amino acid
  Variant (350)..(350): Xaa in position 350 is any amino acid
  Variant (352)..(352): Xaa in position 352 is any amino acid
TGGTIAXXXXXXXXXXXYXXXXXXXXXXXLXXXXPXXXXXXXXXXXXQXXXXXXXXXSXXXXXXXXXXLXXXXXXXXXXXXXXXXGXVXTHGTDTXEETAXFLXXXXXXXXXPXVXXGXMRPXXXXXADGXXNLXXAXXXAXXXXXXXXGXXXXXNXXIXXXXXXXKXXXXXXXXXFXXXXXGXXGXXXXXXXXXXXXXXXXXXXXXXXXXXXXXXXXXXXXXXXXXXXXXXXPXVXIXXXXXXXXXXXXXXXXXXXXXXGXXXAXXGXGXXXXXXXXXXXXXXXXXXXXXXXXXXRXXXGXXXXXXXXXXXXXXXXXXXXXXXXXXXXXXXXXXXXXXLNPXKARXLLXLXL

SEQ ID NO: 158031 - protein, 18 aa, Artificial sequence
  protein pattern
  Variant (2)..(2): Xaa in position 2 is any amino acid
  Variant (3)..(4): Xaa in position 3 to 4 is Ile or Val
  Variant (11)..(11): Xaa in position 11 is any amino acid
  Variant (12)..(12): Xaa in position 12 is any or no amino acid
  Variant (14)..(14): Xaa in position 14 is Glu, Ser or Thr
  Variant (15)..(15): Xaa in position 15 is Ala, Ser or Thr
  Variant (16)..(17): Xaa in position 16 to 17 is any amino acid
  Variant (18)..(18): Xaa in position 18 is Phe, Ile or Leu
GXXXTHGTDTXXEXXXXX

SEQ ID NO: 158032 - protein, 13 aa, Artificial sequence
  protein pattern
  Variant (7)..(12): Xaa in position 7 to 12 is any or no amino acid
TGGTIAXXXXXXG

SEQ ID NO: 158033 - DNA, 603 bp, SACCHAROMYCES CEREVISIAE
  CDS (1)..(603)
atggcttggactagtacattaccagcgcatctactgaacctgatcaaaaactccaaatatgttcacgtggccacctgttctaaagactgcatcccttcagtggcattgatgaactatatctatgtgccaggtgaaaaactgttcggtcaaacagataataagaatgactacattatatttgtttctcctcaggacacacaaaagttttacaacatcaaggagaaccctaaggtcgccctgttgtttcacgattggatcatcgcgaataatttgtcagtgggcaaggaaagcatctctgggactccgacgccgacttctattcctcatgaagagcaacgtcaaagcgagcttttaaatttgttacaggagttaaatcaagccgaattgaaccaaatgagcgcatctattggtggcgaaaccgaaattgtcaatcctgaaagtgaagaatccaagtactataaagatttaatactaaaggctaatcctgatgcgaaagcttttatatttgaaaagaacaccgccgttgttaaagttagaattgataatgctagggtatccaataatgagaacagaacaatgtttctaagtaaagggaagagttaa

SEQ ID NO: 158034 - protein, 200 aa, SACCHAROMYCES CEREVISIAE
MAWTSTLPAHLLNLIKNSKYVHVATCSKDCIPSVALMNYIYVPGEKLFGQTDNKNDYIIFVSPQDTQKFYNIKENPKVALLFHDWIIANNLSVGKESISGTPTPTSIPHEEQRQSELLNLLQELNQAELNQMSASIGGETEIVNPESEESKYYKDLILKANPDAKAFIFEKNTAVVKVRIDNARVSNNENRTMFLSKGKS

SEQ ID NO: 158035 - DNA, 615 bp, Saccharomyces cerevisiae
  CDS (1)..(615)
atgaaactcaatgaacaaataccaaaagacctgttacgcctgattaaaagttccaagtatgttcatgtggcgacatgctcgtcaaattgtataccatctgtttcgttgatgcattacatatttgtttcatccgcggaaactttccataaacatgagtatagtatagaaatagattgtaatgactatattatattcacagtgttcgagaaatcagtaacctttcgtaatgtcatgagcaacccaaacgttgcattgctatttcacgattggatcacagctaaaaatttaactcttcgaaaaaaaagcgtccatagtaaagatgatttttcatttgttgagtcagagtctacaaaatttaacaactttttacgagatttgaaccaaagtgaattgaatcaagtgagcgctactatcaatggtattgctgatattgtgaaccctaatagtgaagaatctacttattataggcggttgttattaacagtcaatccagacgcagatatttttatactaggagaagatacagccataataaaggtaaatatacaaaaaataaaagtctctgacatggaaaataatacttctacatacggccaaacagtacaaccagtttaa

SEQ ID NO: 158036 - protein, 204 aa, Saccharomyces cerevisiae
MKLNEQIPKDLLRLIKSSKYVHVATCSSNCIPSVSLMHYIFVSSAETFHKHEYSIEIDCNDYIIFTVFEKSVTFRNVMSNPNVALLFHDWITAKNLTLRKKSVHSKDDFSFVESESTKFNNFLRDLNQSELNQVSATINGIADIVNPNSEESTYYRRLLLTVNPDADIFILGEDTAIIKVNIQKIKVSDMENNTSTYGQTVQPV

SEQ ID NO: 158037 - DNA, 576 bp, Ashbya gossypii ATCC 10895
  CDS (1)..(576)
atgaactctttaccagaccatatcctgcacctattgaagacatcgaagtatgttcacctggcgactgcatcatctgatggtgtaccttctgtatccttgatgaactacgcctacctcgcaccggagagctccgagacagaaggggacacgcactacatagtatttgcgacatctgctgtcactgagaaatacaagaatatcaccaccaatccaaatgtttccttattgatacatgactgggtcactgctaagaagctatccttgagaaagaatagcacgtctgcttcgctctcagggggcgcgggttcggaggctgagaaagctccgagccgtcttctgaatatattacaagagttaaatcagtcgaagctttctcagatgagtgctactcttaaagggcttgcagaggttatcgattcttcctctccagatttcgtgttataccgggatgccttgctcaaggctaatcctgatgccaagtgcttcgtcctgggggacgatgtggttatagtcaaggcccaaattactggtgccaaggtttccgataccagcaataacactgctatctactattag

SEQ ID NO: 158038 - protein, 191 aa, Ashbya gossypii ATCC 10895
MNSLPDHILHLLKTSKYVHLATASSDGVPSVSLMNYAYLAPESSETEGDTHYIVFATSAVTEKYKNITTNPNVSLLIHDWVTAKKLSLRKNSTSASLSGGAGSEAEKAPSRLLNILQELNQSKLSQMSATLKGLAEVIDSSSPDFVLYRDALLKANPDAKCFVLGDDVVIVKAQITGAKVSDTSNNTAIYY

SEQ ID NO: 158039 - DNA, 606 bp, Vanderwaltozyma polyspora DSM 70294
  CDS (1)..(606)
atgtcttgcactcagaaatttcccaaccatttgattaatttaatcaagacttcaaaatatgtgcatttagcaacatgttcaaaggattgtgtaccatcggtatctttgatgaattacacatatgttccagccgacaagagttataatcataaagaaggtcaaaccgatgattacattatatttgctacctgtgctaatactgaaaaatatgaaaacatcttggctaatccagccgtttcgttgttatttcatgattggattactgctaataatttatcagtaaggaaaaatagtttatcacaatctgctactccagatccaaccactttaccaacttcgactaagggttctcatccaagtaaattactaaacttgttacaagagttgaaccaagctgaattaaatgaaatgagtgcaactttaaagggtagagctgaattaattgctccatccaccgaagaatctgcttattacaagaaactattattgagaaccaatccagatgccgatgtgtttatcttaggtgacaatacttatgtcgtaaaagtgaaaatcgttagtgctaaggttactgacagtgaaaataatactacaatttacaattaa

SEQ ID NO: 158040 - protein, 201 aa, Vanderwaltozyma polyspora DSM 70294
MSCTQKFPNHLINLIKTSKYVHLATCSKDCVPSVSLMNYTYVPADKSYNHKEGQTDDYIIFATCANTEKYENILANPAVSLLFHDWITANNLSVRKNSLSQSATPDPTTLPTSTKGSHPSKLLNLLQELNQAELNEMSATLKGRAELIAPSTEESAYYKKLLLRTNPDADVFILGDNTYVVKVKIVSAKVTDSENNTTIYN

SEQ ID NO: 158041 - DNA, 636 bp, Candida glabrata CBS 138
  CDS (1)..(636)
atgtcgataatttcaaagaagtttccagatgacttgatagctttgatacgctcctcaaagtatgtccatgttgctacttgttcgaaatactgtgagccatcggtatcactgatgaactacgtttacttggaaaaaccacagctattctctgaattcttttgtgctgatttaaaaggagcatatgaagactccgatggtatagataatgggtatattatatttgctacttttgatgaaacggagaaaatcggcaacatacgagaaaacccaaaagtatcactgttgttccacgattggatatcagcaaataacctttctcttcgtaaaggtaatcctctactgaactcatctggatcaattgagttttctccgcaatacagtcacggcaataggatatcaaatgttctcaataatcttgaggacaatgaattgaaccagatgagtgctacaattacggggcatgcacgaatagttgactgtgattcagatgaatctacatactatatgagattacttttaggtgctaacccagatgctgatatttttattttagctgaaaatgccgtaattgttatagtcaagatgttagatgctaaagtttctgacaatgaaaacaatgttggtatttataagtga

SEQ ID NO: 158042 - protein, 211 aa, Candida glabrata CBS 138
MSIISKKFPDDLIALIRSSKYVHVATCSKYCEPSVSLMNYVYLEKPQLFSEFFCADLKGAYEDSDGIDNGYIIFATFDETEKIGNIRENPKVSLLFHDWISANNLSLRKGNPLLNSSGSIEFSPQYSHGNRISNVLNNLEDNELNQMSATITGHARIVDCDSDESTYYMRLLLGANPDADIFILAENAVIVIVKMLDAKVSDNENNVGIYK

SEQ ID NO: 158043 - DNA, 630 bp, Candida glabrata CBS 138
  CDS (1)..(630)
atgccttgtactgaaaaatttccaggacatttgattcacttaatcaaaacttccaagtatgtacatgttggtacatgttctaaggattgtgttccatctgtatcgttgatgaactattcatatattccaagagataaaacctttgatcaagagaatgacaagaatgattacataatttttgctaccaacaaggattccgagaaataccataatatggttgctaatcctcccgtttcacttttgtttcatgattggattacagcaaataatttatctgtgaggaaagctagtttatcacagaccccaacacctgatcctgcttctacacagctgaatcctgcttccggtacggggggcggtgcaattccaaactcacatccaagcaaactgcttaacctattgcatgaactaaatcaggctgaattgaatcaaatgagtgctaatatcaaaggccatgcaaagattgttaatccagctactgaggaatctaaattctacaagcaattacttctgaagactaatccagacgctgaggttttcattctaggtgataacactgttattgtcaaggttaagatcgagagtgctaaggtgacagatagcgaaaataacaccgctgtttacaaatga

SEQ ID NO: 158044 - protein, 209 aa, Candida glabrata CBS 138
MPCTEKFPGHLIHLIKTSKYVHVGTCSKDCVPSVSLMNYSYIPRDKTFDQENDKNDYIIFATNKDSEKYHNMVANPPVSLLFHDWITANNLSVRKASLSQTPTPDPASTQLNPASGTGGGAIPNSHPSKLLNLLHELNQAELNQMSANIKGHAKIVNPATEESKFYKQLLLKTNPDAEVFILGDNTVIVKVKIESAKVTDSENNTAVYK

SEQ ID NO: 158045 - DNA, 588 bp, Kluyveromyces lactis NRRL Y-1140
  CDS (1)..(588)
atgtccactaccgttgatttgccagagcatttagtatctttgcttaaaacatccaaatatgttcatttagccacagcttctaaagactgcattcctaatgtttcattgatgaactacacatatgtgcttcctcataaagcctttcatgaagaaggctccaatagtcattatgttatctttgccacatcaaagtctactcaaaagtataagaatattattgctaacccatctgtatctcttttgatccatgactgggtcacagcaaaaaaactatctctgaggaaaacaagtgtatccaatactccagtgccagattctaatgattctgaagaacaaccaagtaggttgctcaaccttttgcaagagttgaatcaatctgaactatcacaaatgtcagccacgctatcaggtacagcgacagttattgatccatcatctgaagaatccgactactatgaaaagcaactactaagagtgaatccagatgctaattgttatatcaaaggtgatgacaacgtgatcatcaaggttaagatattggatgcaaagatatctgatagcgaaaacagaacaagctactatacctga

SEQ ID NO: 158046 - protein, 195 aa, Kluyveromyces lactis NRRL Y-1140
MSTTVDLPEHLVSLLKTSKYVHLATASKDCIPNVSLMNYTYVLPHKAFHEEGSNSHYVIFATSKSTQKYKNIIANPSVSLLIHDWVTAKKLSLRKTSVSNTPVPDSNDSEEQPSRLLNLLQELNQSELSQMSATLSGTATVIDPSSEESDYYEKQLLRVNPDANCYIKGDDNVIIKVKILDAKISDSENRTSYYT

SEQ ID NO: 158047 - DNA, 603 bp, Saccharomyces cerevisiae (strain YJM789)
  CDS (1)..(603)
atggcttggactagtacattaccagcacatctgctgaacctgatcaaaaactccaaatatgttcacgtagccacctgttctaaagactgcatcccttcagtggcattgatgaactatatctatgtgccaggtgaaaaactgttcggccaaacagataataagaatgactacattatatttgttactcctcaggacacacaaaagttttacaacatcaaggagaaccctaaggtcgccctgttgtttcacgattggatcatcgcgaataatttgtcagtgggcaaggaaagcatctctgggactccgacgccgacttctattcctcatgacgagcaacgtcaaagcaagcttttaaatttgttacaggagttaaatcaagccgaattgaaccagatgagcgcatctattggtggcgaaaccgaaattgtcaatcctgaaagtgaagaatccaagtactataaagatttaatactaaaggctaatcctgatgcgaaagcttttatatttgaaaagaacaccgccgttgttaaagttagaattgataatgctagggtatccaataatgagaacagaacaatgtttctaagtaaagggaagagttaa

SEQ ID NO: 158048 - protein, 200 aa, Saccharomyces cerevisiae (strain YJM789)
MAWTSTLPAHLLNLIKNSKYVHVATCSKDCIPSVALMNYIYVPGEKLFGQTDNKNDYIIFVTPQDTQKFYNIKENPKVALLFHDWIIANNLSVGKESISGTPTPTSIPHDEQRQSKLLNLLQELNQAELNQMSASIGGETEIVNPESEESKYYKDLILKANPDAKAFIFEKNTAVVKVRIDNARVSNNENRTMFLSKGKS

SEQ ID NO: 158049 - DNA, 615 bp, Saccharomyces cerevisiae (strain YJM789)
  CDS (1)..(615)
atgaaactcaatgaacaaataccaaaagacctgttacgcctgattaaaagttccaagtatgttcatgtggcgacatgctcgtcaaattgtataccatctgtttcgttgatgcattacatatttgtttcatccgcggaaactttccataaacatgagtatagtatagaaataggttgtaatgactatattatattcacagtgttcgagaaatcagtaacctttcgtaatgtcatgagcaacccaaacgttgcattgctatttcacgattggatcacagctaaaaatttaactcttcgaaaaaaaagcgtccatagtaaagatgatttttcatttgttgagtcagagtctacaaaatttaacaactttttacgagatttgaaccaaaatgaattgaatcaagtgagcgctactatcaatggtattgctgatattgtgaaccctaatagtgaagaatctacttattataggcggttgttattaacagccaatccagacgcagatatttttatactaggagaagatacagccataataaaggtaaatatacaaaaaataaaagtctctgacatggaaaataatacttctacatacggccaaacagtacaaccagtttaa

SEQ ID NO: 158050 - protein, 204 aa, Saccharomyces cerevisiae (strain YJM789)
MKLNEQIPKDLLRLIKSSKYVHVATCSSNCIPSVSLMHYIFVSSAETFHKHEYSIEIGCNDYIIFTVFEKSVTFRNVMSNPNVALLFHDWITAKNLTLRKKSVHSKDDFSFVESESTKFNNFLRDLNQNELNQVSATINGIADIVNPNSEESTYYRRLLLTANPDADIFILGEDTAIIKVNIQKIKVSDMENNTSTYGQTVQPV

SEQ ID NO: 158051 - DNA, 615 bp, Saccharomyces cerevisiae (strain RM11-1a)
  CDS (1)..(615)
atgaaactcaatgaacaaataccaaaagacctgttacgcctgataaaaagttccaagtatgttcatgtggcgacatgctcgacaaattctataccatctgtttcgctgatgcattacatatttgtttcatccgcggaaactttccataaacatgagtatagtatagaaatagattgtaatgactatattatattcacagtgttcgagaaatcagtaacctttcgtaatgtcatgagcaacccaaacgttgcattgctatttcacgattggatcacagctaaaaatttaactcttcgaaaaaaaagcgtccatagtaaagatgatttttcatttgttgagtcagagtccacaaaatttaacaactttttacgagatttgaaccaaagtgaattgaatcaagtgagcgctactatcaatggtattgctgatattgtgaaccctaatagtgaagaatctacttattataggcggttgttattaacagccaatccagacgcagatatttttatactaggagaagatacagccataataaaggtaaatatacaaaaaataaaagtctctgacatggaaaataatacttcttcatacggccaaacagtacaaccagtttaa

SEQ ID NO: 158052 - protein, 204 aa, Saccharomyces cerevisiae (strain RM11-1a)
MKLNEQIPKDLLRLIKSSKYVHVATCSTNSIPSVSLMHYIFVSSAETFHKHEYSIEIDCNDYIIFTVFEKSVTFRNVMSNPNVALLFHDWITAKNLTLRKKSVHSKDDFSFVESESTKFNNFLRDLNQSELNQVSATINGIADIVNPNSEESTYYRRLLLTANPDADIFILGEDTAIIKVNIQKIKVSDMENNTSSYGQTVQPV

SEQ ID NO: 158053 - DNA, 603 bp, Saccharomyces cerevisiae (strain AWRI1631)
  CDS (1)..(603)
atggcttggactagtacattaccagcgcatctactgaacctgatcaaaaactccaaatatgttcacgtggccacctgttctaaagactgcatcccttcagtggcattgatgaactatatctatgtgccaggtgaaaaactgttcggtcaaacagataataagaatgactacattatatttgttactcctcaggacacacaaaagttttacaacatcaaggagaaccctaaggtcgccctgttgtttcacgattggatcatcgcgaataatttgtcagtgggcaaggaaagcatctctgggactccgacgccgacttctattcctcatgaagagcaacgtcaaagcgagcttttaaatttgttacaggagttaaatcaagccgaattgaaccaaatgagcgcatctattggtggcgaaaccgaaattgtcaatcctgaaagtgaagaatccaagtactataaagatttaatactaaaggctaatcctgatgcgaaagcttttatatttgaaaagaacaccgccgttgttaaagttagaattgataatgctagggtatccaataatgagaacagaacaatgtttctaagtaaagggaagagttaa

SEQ ID NO: 158054 - protein, 200 aa, Saccharomyces cerevisiae (strain AWRI1631)
MAWTSTLPAHLLNLIKNSKYVHVATCSKDCIPSVALMNYIYVPGEKLFGQTDNKNDYIIFVTPQDTQKFYNIKENPKVALLFHDWIIANNLSVGKESISGTPTPTSIPHEEQRQSELLNLLQELNQAELNQMSASIGGETEIVNPESEESKYYKDLILKANPDAKAFIFEKNTAVVKVRIDNARVSNNENRTMFLSKGKS

SEQ ID NO: 158055 - DNA, 24 bp, Artificial sequence
  primer
atggcttggactagtacattacca

SEQ ID NO: 158056 - DNA, 26 bp, Artificial sequence
  primer
ttaactcttccctttacttagaaaca

SEQ ID NO: 158057 - protein, 218 aa, Artificial sequence
  consensus sequence
  Variant (2)..(4): Xaa in position 2 to 4 is any amino acid
  Variant (5)..(7): Xaa in position 5 to 7 is any or no amino acid
  Variant (9)..(10): Xaa in position 9 to 10 is any amino acid
  Variant (12)..(13): Xaa in position 12 to 13 is any amino acid
  Variant (17)..(17): Xaa in position 17 is any amino acid
  Variant (23)..(23): Xaa in position 23 is any amino acid
  Variant (28)..(29): Xaa in position 28 to 29 is any amino acid
  Variant (31)..(31): Xaa in position 31 is any amino acid
  Variant (35)..(35): Xaa in position 35 is any amino acid
  Variant (38)..(38): Xaa in position 38 is any amino acid
  Variant (40)..(47): Xaa in position 40 to 47 is any amino acid
  Variant (49)..(55): Xaa in position 49 to 55 is any amino acid
  Variant (56)..(69): Xaa in position 56 to 69 is any or no amino acid
  Variant (74)..(83): Xaa in position 74 to 83 is any amino acid
  Variant (85)..(87): Xaa in position 85 to 87 is any amino acid
  Variant (90)..(90): Xaa in position 90 is any amino acid
  Variant (92)..(92): Xaa in position 92 is any amino acid
  Variant (100)..(100): Xaa in position 100 is any amino acid
  Variant (102)..(102): Xaa in position 102 is any amino acid
  Variant (105)..(107): Xaa in position 105 to 107 is any amino acid
  Variant (109)..(109): Xaa in position 109 is any amino acid
  Variant (111)..(128): Xaa in position 111 to 128 is any amino acid
  Variant (129)..(144): Xaa in position 129 to 144 is any or no amino acid
  Variant (146)..(146): Xaa in position 146 is any amino acid
  Variant (148)..(149): Xaa in position 148 to 149 is any amino acid
  Variant (153)..(153): Xaa in position 153 is any amino acid
  Variant (158)..(158): Xaa in position 158 is any amino acid
  Variant (161)..(163): Xaa in position 161 to 163 is any amino acid
  Variant (165)..(170): Xaa in position 165 to 170 is any amino acid
  Variant (172)..(172): Xaa in position 172 is any amino acid
  Variant (177)..(177): Xaa in position 177 is any amino acid
  Variant (180)..(181): Xaa in position 180 to 181 is any amino acid
  Variant (183)..(183): Xaa in position 183 is any amino acid
  Variant (185)..(186): Xaa in position 185 to 186 is any amino acid
  Variant (191)..(192): Xaa in position 191 to 192 is any amino acid
  Variant (195)..(202): Xaa in position 195 to 202 is any amino acid
  Variant (205)..(205): Xaa in position 205 is any amino acid
  Variant (207)..(210): Xaa in position 207 to 210 is any amino acid
  Variant (213)..(214): Xaa in position 213 to 214 is any amino acid
  Variant (217)..(217): Xaa in position 217 is any amino acid
MXXXXXXPXXLXXLIKXSKYVHXATCSXXCXPSVXLMXYXXXXXXXXFXXXXXXXXXXXXXXXXXXXXXYIIFXXXXXXXXXXNXXXNPXVXLLFHDWIXAXNLXXXKXSXXXXXXXXXXXXXXXXXXXXXXXXXXXXXXXXXXNXLXXLNQXELNQXSAXXXGXXXXXXPXSEESXYYXXLXLXXNPDAXXFIXXXXXXXXKVXIXXXXVSXXENXT

SEQ ID NO: 158058 - protein, 60 aa, Artificial sequence
  protein pattern
  Variant (2)..(3): Xaa in position 2 to 3 is any amino acid
  Variant (4)..(4): Xaa in position 4 is any or no amino acid
  Variant (6)..(7): Xaa in position 6 to 7 is any or no amino acid
  Variant (11)..(11): Xaa in position 11 is Glu or Gln
  Variant (12)..(12): Xaa in position 12 is Met or Val
  Variant (15)..(15): Xaa in position 15 is Asn, Ser or Thr
  Variant (16)..(16): Xaa in position 16 is Ile or Leu
  Variant (17)..(17): Xaa in position 17 is any amino acid
  Variant (19)..(19): Xaa in position 19 is any amino acid
  Variant (20)..(20): Xaa in position 20 is Ala or Thr
  Variant (21)..(21): Xaa in position 21 is Asp, Glu, Lys or Arg
  Variant (22)..(22): Xaa in position 22 is Ile or Leu
  Variant (23)..(23): Xaa in position 23 is Ile or Val
  Variant (24)..(24): Xaa in position 24 is Ala, Asp or Asn
  Variant (25)..(25): Xaa in position 25 is Cys or Pro
  Variant (26)..(26): Xaa in position 26 is Ala, Asp, Glu, Asn or Ser
  Variant (27)..(27): Xaa in position 27 is Ser or Thr
  Variant (28)..(28): Xaa in position 28 is Asp or Glu
  Variant (31)..(31): Xaa in position 31 is any amino acid
  Variant (32)..(32): Xaa in position 32 is Phe or Tyr
  Variant (34)..(35): Xaa in position 34 to 35 is any amino acid
  Variant (37)..(37): Xaa in position 37 is Ile or Leu
  Variant (39)..(39): Xaa in position 39 is any amino acid
  Variant (40)..(40): Xaa in position 40 is Ala, Thr or Val
  Variant (45)..(45): Xaa in position 45 is Asp, Glu or Lys
  Variant (46)..(46): Xaa in position 46 is Ala, Ile or Val
  Variant (49)..(49): Xaa in position 49 is Phe or Leu
  Variant (50)..(50): Xaa in position 50 is Ala, Glu or Gly
  Variant (51)..(51): Xaa in position 51 is Asp, Glu or Lys
  Variant (52)..(52): Xaa in position 52 is Asp or Asn
  Variant (53)..(53): Xaa in position 53 is Ala or Thr
  Variant (54)..(54): Xaa in position 54 is any amino acid
  Variant (55)..(56): Xaa in position 55 to 56 is Ile or Val
  Variant (57)..(57): Xaa in position 57 is any amino acid
  Variant (59)..(59): Xaa in position 59 is any amino acid
  Variant (60)..(60): Xaa in position 60 is Ile or Met
LXXXNXXELNXXSAXXXGXXXXXXXXXXESXXYXXLXLXXNPDAXXFIXXXXXXXXXVXX

SEQ ID NO: 158059 - protein, 43 aa, Artificial sequence
  protein pattern
  Variant (2)..(2): Xaa in position 2 is any amino acid
  Variant (3)..(3): Xaa in position 3 is Asp or His
  Variant (5)..(6): Xaa in position 5 to 6 is any or no amino acid
  Variant (8)..(9): Xaa in position 8 to 9 is any or no amino acid
  Variant (11)..(11): Xaa in position 11 is Lys or Arg
  Variant (12)..(12): Xaa in position 12 is Asn, Ser or Thr
  Variant (18)..(18): Xaa in position 18 is Leu or Val
  Variant (19)..(19): Xaa in position 19 is Ala or Gly
  Variant (23)..(24): Xaa in position 23 to 24 is any amino acid
  Variant (25)..(25): Xaa in position 25 is Cys or Ser
  Variant (26)..(26): Xaa in position 26 is any amino acid
  Variant (30)..(30): Xaa in position 30 is Ala or Ser
  Variant (33)..(33): Xaa in position 33 is any amino acid
  Variant (35)..(35): Xaa in position 35 is any amino acid
  Variant (36)..(36): Xaa in position 36 is Phe or Tyr
  Variant (37)..(37): Xaa in position 37 is Ile, Leu or Val
  Variant (38)..(38): Xaa in position 38 is Glu, Pro or Ser
  Variant (39)..(42): Xaa in position 39 to 42 is any amino acid
  Variant (43)..(43): Xaa in position 43 is Phe or Tyr
PXXLXXLXXIXXSKYVHXXTCSXXXXPSVXLMXYXXXXXXXXX

SEQ ID NO: 158060 - protein, 59 aa, Artificial sequence
  protein pattern
  Variant (2)..(2): Xaa in position 2 is any amino acid
  Variant (3)..(5): Xaa in position 3 to 5 is any or no amino acid
  Variant (7)..(7): Xaa in position 7 is Ile or Val
  Variant (10)..(10): Xaa in position 10 is Ala, Thr or Val
  Variant (11)..(11): Xaa in position 11 is Ser, Thr or Val
  Variant (12)..(14): Xaa in position 12 to 14 is any amino acid
  Variant (15)..(15): Xaa in position 15 is Ser or Thr
  Variant (16)..(19): Xaa in position 16 to 19 is any amino acid
  Variant (21)..(21): Xaa in position 21 is Ile, Met or Val
  Variant (22)..(22): Xaa in position 22 is any amino acid
  Variant (23)..(23): Xaa in position 23 is Ala, Glu or Ser
  Variant (26)..(26): Xaa in position 26 is any amino acid
  Variant (28)..(28): Xaa in position 28 is Ala or Ser
  Variant (31)..(31): Xaa in position 31 is Phe or Ile
  Variant (35)..(35): Xaa in position 35 is Ile or Val
  Variant (36)..(36): Xaa in position 36 is any amino acid
  Variant (38)..(39): Xaa in position 38 to 39 is any amino acid
  Variant (41)..(41): Xaa in position 41 is Ser or Thr
  Variant (42)..(42): Xaa in position 42 is Leu or Val
  Variant (43)..(43): Xaa in position 43 is any amino acid
  Variant (45)..(45): Xaa in position 45 is any amino acid
  Variant (46)..(46): Xaa in position 46 is Asn or Ser
  Variant (47)..(47): Xaa in position 47 is Ile, Leu, Pro or Val
  Variant (48)..(50): Xaa in position 48 to 50 is any amino acid
  Variant (51)..(51): Xaa in position 51 is Asp, Pro or Ser
  Variant (52)..(52): Xaa in position 52 is Asp, Ser, Thr or Val
  Variant (53)..(53): Xaa in position 53 is any amino acid
  Variant (54)..(54): Xaa in position 54 is Asp, Ser or Thr
  Variant (55)..(58): Xaa in position 55 to 58 is any amino acid
  Variant (59)..(59): Xaa in position 59 is Asp, Glu, Pro or Gln
NXXXXYXIFXXXXXXXXXXNXXXNPXVXLLXHDWXXAXXLXXXKXXXXXXXXXXXXXXX
